(19) United States
(12) Patent Application Publication
(10) Pub. No.: US 2023/0058864 A1
(43) Pub. Date: Feb. 23, 2023

(54) COMPOSITIONS AND METHODS FOR TREATING PATHOLOGIC CALCIFICATION

(71) Applicant: Muhammad Farooq Rai, St. Louis, MO (US)

(72) Inventor: Muhammad Farooq Rai, St. Louis, MO (US)

(73) Assignee: Washington University, St. Louis, MO (US)

(21) Appl. No.: 17/814,968

(22) Filed: Jul. 26, 2022

Related U.S. Application Data
(60) Provisional application No. 63/227,095, filed on Jul. 29, 2021.

(51) Int. Cl. C12N 15/113; A61P 19/00

(52) U.S. Cl. CPC C12N 15/1135; A61P 19/00; C12N 2310/122

(57) ABSTRACT

Among the various aspects of the present disclosure is the provision of methods for treating pathologic calcification or bone formation and methods of inhibiting KIF26B that include administering a therapeutically effective amount of a synthetic nucleic acid against KIF26B. Compositions comprising a small hairpin RNA (shRNA) against KIF26B are also provided.

### CROSS-REFERENCE TO RELATED APPLICATIONS

[0001] This application claims priority from U.S. Provisional Application Ser. No. 63/227,095 filed on 29 Jul. 2021, which is incorporated herein by reference in its entirety.

### STATEMENT REGARDING FEDERALLY SPONSORED RESEARCH OR DEVELOPMENT

[0002] Not applicable.

### MATERIAL INCORPORATED-BY-REFERENCE

[0003] The Sequence Listing, which is a part of the present disclosure, includes a computer-readable form comprising nucleotide and/or amino acid sequences of the present invention (file name “019814-US-NP_Sequence_Listing.xml” created on 20 Jul. 2022; 1,004,163 bytes). The subject matter of the Sequence Listing is incorporated herein by reference in its entirety.

### FIELD OF THE INVENTION

[0004] The present disclosure generally relates to methods for treating or preventing pathologic calcification or bone formation using synthetic nucleotides targeted to KIF26B.

### SUMMARY OF THE INVENTION

[0005] Among the various aspects of the present disclosure are methods for treating pathologic calcification or bone formation and methods of inhibiting KIF26B.

[0006] One aspect of the present disclosure provides for a method of treating or preventing pathologic calcification or bone formation in a subject comprising administering a therapeutically effective amount of a synthetic nucleic acid against KIF26B.

[0007] In some embodiments, the synthetic nucleic acid comprises SEQ ID NO: 1 or a sequence at least about 80% identical to SEQ ID NO: 1; SEQ ID NO: 2 or a sequence at least about 80% identical to SEQ ID NO: 2; or any variant thereof having KIF26B inhibiting activity.

[0008] In some embodiments, the synthetic nucleic acid is a small hairpin RNA (shRNA).

[0009] In some embodiments, the therapeutically effective amount of the synthetic nucleic acid reduces KIF26B mRNA or protein expression.

[0010] In some embodiments, the subject has or is suspected of having intra-articular ectopic calcification.

[0011] In some embodiments, the intra-articular ectopic calcification is injury-induced ectopic calcification or surgery-induced ectopic calcification.

[0012] In some embodiments, the subject has or is suspected of having pathologic osteogenesis, heterotopic ossification, pathologic bone formation, osteoarthritis, arthroplasty, or a traumatic injury.

[0013] In some embodiments, the therapeutically effective amount of the synthetic nucleic acid reduces or prevents osteogenesis; increases chondrogenesis; reduces expression of osteogenic marker genes; increases expression of chondrogenic marker genes; or reduces expression of Wnt/β-catenin pathway genes.

[0014] In some embodiments, the therapeutically effective amount of the synthetic nucleic acid reduces cell proliferation, reduces cell viability, or induces cell apoptosis.

[0015] In some embodiments, the cell is a progenitor cell, a stem cell, a cell capable of osteogenic differentiation, or a cell capable of chondrogenic differentiation.

[0016] In some embodiments, the therapeutically effective amount of the synthetic nucleic acid reduces or prevents ectopic calcification or formation of calcified nodules.

[0017] In some embodiments, the therapeutically effective amount of the synthetic nucleic acid is administered intra-articularly.

[0018] Another aspect of the present disclosure provides for a method of inhibiting KIF26B expression in a subject in need thereof, the method comprising administrating a therapeutically effective amount of a synthetic nucleic acid against KIF26B.

[0019] In some embodiments, the synthetic nucleic acid is a small hairpin RNA (shRNA).

[0020] In some embodiments, the synthetic nucleic acid comprises SEQ ID NO: 1 or a sequence at least about 80% identical to SEQ ID NO: 1; SEQ ID NO: 2 or a sequence at least about 80% identical to SEQ ID NO: 2; or any variant thereof having KIF26B inhibiting activity.

[0021] In some embodiments, the subject has or is suspected of having intra-articular ectopic calcification.

[0022] In some embodiments, the therapeutically effective amount of the synthetic nucleic acid is administered intra-articularly.

[0023] Another aspect of the present disclosure provides for a composition comprising a small hairpin RNA (shRNA) against KIF26B, the shRNA comprising SEQ ID NO: 1 or a sequence at least about 80% identical to SEQ ID NO: 1; SEQ ID NO: 2 or a sequence at least about 80% identical to SEQ ID NO: 2; or any variant thereof having KIF26B inhibiting activity.

[0024] In some embodiments, the shRNA reduces KIF26B mRNA or protein expression.

[0025] In some embodiments, the composition further comprises a lentivirus.

[0026] Other objects and features will be in part apparent and in part pointed out hereinafter.

### DESCRIPTION OF THE DRAWINGS

[0027] The patent or application file contains at least one drawing executed in color. Copies of this patent or patent application publication with color drawing(s) will be provided by the Office upon request and payment of the necessary fee.

[0028] Those of skill in the art will understand that the drawings, described below, are for illustrative purposes only. The drawings are not intended to limit the scope of the present teachings in any way.

[0029] FIG. 1A-FIG. 1B. Study design. A. In vitro studies were performed using human ACLp cells, murine C2C12, or C3H10T1/2 cells. Cells were transduced with a scrambled shRNA or KIF26B shRNA. Osteogenesis was induced by osteogenesis differentiation medium in all cell types. Osteogenesis was detected by Alizarin red staining and the expression of osteogenic marker genes was measured by RT-qPCR. Chondrogenesis was induced by chondrogenic medium in ACLp cells in a pellet culture system. Successful chondrogenesis was ascertained by measuring the expression of chondrogenic marker genes and by Safranin-O staining. The mechanistic role of KIF26B knockdown was studied in osteogenic differentiation of ACLp cells in the presence and absence of Wnt agonist II, SKL2001. Cell proliferation was studied by CCK-8 assay and EdU staining while apoptosis was detected by TUNEL. B. In vivo experiments were conducted in male B6-129SF2/J mice. Mice received either scrambled shRNA or Kif26b shRNA injection in the knee joint after which knees were subjected to non-invasive mechanical loading to instigate intra-articular ectopic calcification. Ectopic calcification was analyzed at 4- and 8-weeks post-loading using micro-CT. Histology was performed to visualize and stain the nodules with Safranin O staining.

[0030] FIG. 2A-FIG. 2G. Construction and characterization of lentivirus KIF26B shRNA. A-B. Human (A) and mouse (B) shRNA sequences targeting KIF26B are shown. C. KIF26B mRNA expression was significantly decreased in ACLp (n=3) cells transduced with KIF26B shRNA compared with scrambled shRNA at the 24-hour time point (Mann-Whitney test). D. After 72 hours of transduction with scrambled shRNA or KIF26B shRNA, KIF26B protein was also reduced in ACLp cells (n=3) treated with KIF26B shRNA compared with scrambled shRNA as shown by representative blots. E. Quantification of Western blot signal intensity revealed that KIF26B protein expression was significantly less in cells treated with KIF26B shRNA compared with those transduced with scrambled shRNA (Unpaired t-test). F-G. After 24 hours of transduction with Kif26b shRNA or scrambled shRNA, Kif26b mRNA expression was significantly decreased in C3H10T1/2 (n=4) (F) and C2C12 cells (n=3) (G) transduced with Kif26b shRNA compared with scrambled shRNA (Mann-Whitney test).

[0031] FIG. 3A-FIG. 3D. KIF26B silencing attenuates osteogenesis in ACLp cells. A. KIF26B knockdown significantly arrested matrix mineralization of ACLp cells (n=6) compared to scrambled shRNA as shown by macro and microphotographs of Alizarin red-stained cells (scale bar=100 μm). B-D. mRNA expression of typical osteogenic marker genes namely RUNX2 (B), ALPL (C), and BGLAP (D) was significantly decreased in cells transduced with KIF26B shRNA (n=6) compared with those transduced with scrambled shRNA (n=6) (Mann-Whitney test).

[0032] FIG. 4A-FIG. 4F. KIF26B silencing attenuates osteogenesis in C3H10T1/2 and C2C12 cells. A-B. Kif26b knockdown significantly arrested matrix mineralization of C3H10T1/2 cells (n=3) (A) and C2C12 cells (n=3) (B) compared to scrambled shRNA as shown by macro and microphotographs of Alizarin red-stained cells (scale bar=200 μm). C-F. mRNA expression of typical osteogenic marker genes namely Runx2 (C), Alpl (D), and Bglap (E) as well as AXIN2 (F) was significantly decreased in C2C12 cells (n=3) transduced with KIF26B shRNA compared with those transduced with scrambled shRNA (Mann-Whitney test).

[0033] FIG. 5A-FIG. 5G. KIF26B knockdown resulted in enhanced chondrogenesis in ACLp cells. A. KIF26B mRNA expression was significantly decreased in pellets prepared from ACLp cells (n=3-4) transduced with KIF26B shRNA compared with scrambled shRNA (Mann-Whitney B-D. mRNA expression of typical chondrogenic marker genes namely SOX9 (B), COL2A1 (C), and ACAN (D) was significantly increased in pellets (n=3-4) with cells transduced with KIF26B shRNA than scrambled shRNA in both growth medium and chondrogenic medium. mRNA levels of SOX9, COL2A1, and ACAN in pellets were both significantly increased in chondrogenic medium compared to those in growth medium, regardless of whether cells were transduced with KIF26B shRNA or scrambled shRNA (2-way ANOVA with Šidák's multiple comparison test). E. mRNA expression of AXIN2 was significantly increased in pellet cultures (n=3-4) transduced with KIF26B shRNA compared with those transduced with scrambled shRNA (Mann-Whitney test). F. Size of the pellets was bigger in cells transduced with KIF26B shRNA than scrambled shRNA (n=3 each) (scale bar=1 cm). G. Safranin-O staining of histological sections of pellets showed more intense staining in the KIF26B shRNA group than scrambled shRNA group (n=3 each).

[0034] FIG. 6A-FIG. 6E. Loss of KIF26B decreases the number of living cells and proliferation. A. KIF26B knockdown significantly reduced the number of living ACLp cells (n=4) compared with scrambled shRNA and untreated control groups as determined by CCK-8 assay. $ and &: statistically significant differences between scrambled shRNA and control groups with p=0.011 and p=0.025, respectively; a, b, and c: statistically significant differences between scrambled shRNA and KIF26B shRNA groups with all p<0.05 (2-way ANOVA with Šidák's multiple comparison test). B. After 72 hours of transduction with scrambled shRNA or KIF26B shRNA, the EdU incorporation assay for measuring cell proliferation showed that KIF26B knockdown decreased the numbers of EdU positive cells as displayed in immunofluorescence images (n=3 each). Blue=Hoechst 3342; Green=EdU, scale bar=100 μm. C. Quantification of cell numbers revealed a significantly reduced fraction of EdU positive cells compared to both untreated control and scrambled shRNA groups (1-way analysis of variance with Tukey's post hoc test). D-E. mRNA expression of cell proliferation markers namely PCNA (D), and XRCC2 (E) was significantly decreased in cells treated with KIF26B shRNA (n=6) and compared to both untreated control and scrambled shRNA groups (n=6 each) (Kruskal-Wallis with Dunn's multiple comparison test).

[0035] FIG. 7A-FIG. 7E. Loss of KIF26B induces cellular apoptosis. A. After 72 hours of transduction with scrambled shRNA or KIF26B shRNA, KIF26B knockdown increased the number of TUNEL positive cells as measured by TUNEL assay compared to the scrambled shRNA group (n=4 each). Blue=Hoechst 3342; Green=TUNEL, scale bar=100 μm. B. Quantification revealed that the percentage of TUNEL-positive cells was significantly higher in the KIF26B shRNA group compared to the scrambled shRNA group (Unpaired t-test). C-E. mRNA expression of pro-apoptotic gene BAX(C) was significantly higher in cells treated with KIF26B shRNA compared to the scrambled shRNA group while mRNA expression of anti-apoptotic gene BCL2 (D) was significantly lower in cells treated with KIF26B shRNA. BAX/BCL2 ratio (E) was significantly higher in cells treated with KIF26B shRNA than those treated with scrambled shRNA (n=6 each) (Mann-Whitney test).

[0036] FIG. 8A-FIG. 8E. Modulation of canonical Wnt/β-catenin signaling by KIF26B. A-B. KIF26B knockdown suppressed mRNA expression of Wnt/β-catenin pathway genes namely WNT16 (A) and AXIN2 (B) compared with scrambled shRNA (n=6 each) (Mann-Whitney test). C. After 7 days of osteogenic induction, representative Western blot images showed the expression of non-phosphorylated (active) β-catenin at Ser33/37/Thr41 and total β-catenin in ACLp cells (n=4) transduced with either KIF26B shRNA or scrambled shRNA. D-E. Quantification of Western blot signaling intensity revealed that both active β-catenin (D) and total β-catenin € were significantly lower in the KIF26B shRNA group compared to the scrambled shRNA group (Unpaired t-test).

[0037] FIG. 9A-FIG. 9F. Wnt agonist rescued the loss of osteogenesis due to KIF26B knockdown. A-B. The expression of WNT16 |A| and AXIN2 |B| mRNA was increased significantly in ACLp cells treated with SKL2001 compared with vehicle (DMSO) (n=3 each, Mann-Whitney test). C. Addition of Wnt agonist SKL2001 reversed osteogenesis suppression by KIF26B loss-of-function in cells transduced with KIF26B shRNA as shown by macro and micrographs of cells stained with Alizarin red (n=3 each, scale bar=100 βm). D. After 7 days of osteogenic induction, the protein levels of active and total β-catenin lost due to KIF26B were also regained with SKL2001 treatment (n=3 each). E-F. Quantification of signal intensity of active β-catenin (E) and total β-catenin (F) confirmed the expression pattern of active and total β-catenin (1-way ANOVA with Tukey's post hoc test).

[0038] FIG. 10. Schematic of a proposed mechanism of KIF26B in ectopic calcification and its interaction with Wnt/β-catenin signaling. KIF26B inhibition decreases β-catenin levels by increasing the degradation of β-catenin. It resulted in suppression of osteogenesis and the expression of typical osteogenic-specific marker genes; and elevation of chondrogenesis as well as elevation of chondrogenic-specific marker genes.

[0039] FIG. 11A-FIG. 11C. Kif26b shRNA prompted chondrogenesis and inhibited ectopic calcification in mice. A. Representative low magnification histology images (scale bar=1 mm) are shown for scrambled and Kif26b shRNA groups to provide an overview of the knee joint and ectopic nodule. Confocal microscopy images of Kif26b immunostaining (white arrowhead) in the calcified nodule (red square) or cartilage area (orange square) showing decreased staining intensity of Kif26b in the Kif26b shRNA group indicative of successful Kif26b knockdown in vivo (green=Kif26b, red=Col 2, blue=DAPI, Scale bars=100 μm). In addition, Safranin O staining of nodules showed increased staining intensity in the Kif26b shRNA group compared with the scrambled shRNA group (Scale bar=100 μm) (n=3 each). B. Representative μCT images at 8 weeks are shown demonstrating less calcified nodules in mice receiving Kif26b shRNA (n=8) compared with those receiving scrambled shRNA (n=7) (red arrows point to nodules) C. Quantification of calcified nodules showed that the number of calcified nodules was significantly lower in mice treated with Kif26b shRNA than those treated with shRNA at 8 weeks (Unpaired t-test).

[0040] FIG. 12A-FIG. 12D. ACLp cells express stromal cell markers and exhibit the potential for osteogenesis. A. Cells egressing from ACL explants over a period of 3 weeks (scale bar=200 μm) B. Immunofluorescence staining using antibodies against selected stromal cell markers showed that ACLp cells expressed CD44, CD90, CD146, and Stro-1, and did not express CD14 and CD19 indicating that ACLp cells are progenitor/stromal cells (n=3 each). Blue=DAPI; Green=Surface marker; Red=actin, scale bar=50 μm C. When subjected to osteogenic induction medium, ACLp cells successfully differentiated into osteoblasts depicting their multipotent differentiation potential (scale bar=100 μm). D. Increased osteogenic differentiation of ACLp cells was also evidenced by a significant increase in the expression of ALPL mRNA, a marker of osteogenesis (n=6) (Mann-Whitney test).

[0041] FIG. 13. Effect of KIF26B shRNA on ectopic calcification at 4-week time point. Intra-articular delivery of Kif26b shRNA did not reduce the number of calcified nodules at 4 weeks after injury as determined by in vivo μCT analysis (n=2 each).

[0042] FIG. 14A-FIG. 14F. Effect of KIF26B shRNA on trabecular and subchondral bone parameters. A-E. Trabecular bone parameters for loaded (n=7) and control (n=7) knees showed neither significant load*treatment interaction effect nor treatment effect: bone volume/total volume (BV/TV) (A), trabecular thickness (Tb.Th) (B), trabecular spacing (Tb.Sp) (C), volumetric bone mineral density (vBMD) (D), and tissue mineral density (TMD) € (2-way ANOVA with Šidák's multiple comparison test). F. No significant loading*treatment interaction was found for subchondral bone (SCB) thickness. (2-way ANOVA with Šidák's multiple comparison test). Black filled circle=scrambled shRNA; red filled circle=Kif26b shRNA.

### DETAILED DESCRIPTION OF THE INVENTION

[0043] The present disclosure is based, at least in part, on the discovery that kinesis superfamily member 26b (KIF26B) is associated with injury-induced ectopic calcification. As described herein, inhibition of KIF26B using a synthetic nucleic acid significantly arrested osteogenesis of progenitor/stem cells and hampered the development of intra-articular ectopic calcification after injury (see Example 1). Thus, KIF26B is a therapeutic target for treating or preventing pathologic calcification, bone formation, or related disorders.

[0044] Ectopic calcification is an osteogenic process that leads to the formation of inappropriate bone within intra-articular soft tissues, often in response to injury or surgery. The molecular mechanisms governing this phenotype have yet to be determined. Currently, there are no treatments for ectopic calcification other than corrective surgical procedures.

[0045] As described herein, an association between kinesin superfamily member 26b (KIF26B) and injury-induced ectopic calcification was discovered through quantitative trait locus (QTL) analysis. KIF26B is a member of the kinesin superfamily of microtubule motor proteins known to be expressed in bone. KIF26B was previously identified as a potential severity locus in a GWAS study of patients with hip osteoarthritis. However, its function and mechanistic role in ectopic calcification were not fully understood.

[0046] As described herein, KIF26B was found to play a functional role in osseous and chondrogenic transdifferentiation of human and murine progenitor/stem cells and in a murine model of non-invasive injury-induced intra-articular ectopic calcification. KIF26B ablation via lentivirus-mediated shRNA significantly arrested osteogenesis of progenitor/stem cells and suppressed the expression of typical osteogenic marker genes. Conversely, KIF26B loss-of-function increased chondrogenesis and expression of chondrogenic marker genes. Further, KIF26B knockdown significantly decreased cell viability and proliferation and induced cellular apoptosis.

[0047] As described herein, intra-articular delivery of KIF26B shRNA in mice significantly hampered the development of intra-articular ectopic calcification after injury, with no effect on already formed bone.

[0048] KIF26B plays a crucial role in ectopic bone formation by repressing osteogenesis, but not chondrogenesis, via modulating Wnt/β-catenin signaling. As described herein, KIF26B is a critical determinant of the osteogenic process in pathologic endochondral bone formation and an actionable target for pharmacotherapy to mitigate ectopic calcification and heterotopic ossification.

[0049] KIF26B-Targeted Synthetic Nucleic Acid

[0050] One aspect of the present disclosure provides for a synthetic nucleic acid against KIF26B. As described herein, shRNA sequences were designed to specifically target and silence Kif26b mRNA in Homo sapiens and Mus musculus (see e.g., Example 1).

[0051] As described herein, a synthetic nucleic acid against KIF26B can reduce or prevent the onset and progression of ectopic calcification in the intra-articular region. A synthetic nucleic acid against KIF26B can be any synthetic nucleic acid that can inhibit KIF26B, downregulate KIF26B, silence KIF26B, or knockdown KIF26B.

[0052] As an example, the synthetic nucleic acid against KIF26B can be a small hairpin RNA (shRNA). As another example, the synthetic nucleic acid against KIF26B can be a short interfering RNA (siRNA).

[0053] As another example, RNA (e.g., long noncoding RNA (lncRNA)) can be targeted with antisense oligonucleotides (ASOs) as a therapeutic. Processes for making ASOs targeted to RNAs are well known, see e.g. Zhou et al. 2016 Methods Mol Biol. 1402:199-213. Except as otherwise noted herein, therefore, the process of the present disclosure can be carried out in accordance with such processes.

[0054] In some embodiments, the synthetic nucleic acid against KIF26B comprises CTTGGCTCTTCAAGCTCATAACTCGAGTTATGAGCTTGAAGAGCCAAGTTTT T-3′ (SEQ ID NO: 1), 5′-ctgacaacctgctcatcttatctcgagataagatgagcaggttgtcagttttt-3′ (SEQ ID NO: 2), or a variant thereof having KIF26B silencing activity. As described herein, a synthetic nucleic acid comprising SEQ ID NO: 1 or SEQ ID NO: 2 suppressed the expression of KIF26B both at mRNA and protein levels (see e.g., Example 1).

[0055] While exemplary synthetic nucleic acids against KIF26B have been provided, it can be appreciated by one of skill in the art that variants of such nucleic acids may be used, provided they exhibit KIF26B inhibiting activity. KIF26B inhibiting activity of a synthetic nucleic acid can be verified by any means known in the art. For example, RT-qPCR can be used to measure the expression of KIF26B mRNA in cells transfected with a synthetic nucleic acid against KIF26B compared to a control. As another example, a Western blot can be used to measure the expression of KIF26B protein in cells transfected with a synthetic nucleic acid against KIF26B compared to a control. A synthetic nucleic acid having KIF26B inhibiting activity would be expected to reduce KIF26B mRNA or protein expression compared to a control.

[0056] In some embodiments, the synthetic nucleic acid can be a KIF26B-derived nucleic acid. A KIF26B-derived nucleic acid can be any nucleic acid derived from the KIF26B sequence having KIF26B inhibiting activity, e.g., reduces KIF26B expression at the mRNA or protein level.

[0057] For example, the KIF26B-derived nucleic acid can be derived from the Homo sapiens KIF26B genetic sequence (SEQ ID NO: 3) or corresponding RNA or complementary sequence thereof. As another example, the KIF26B-derived nucleic acid can be derived from the Mus musculus KIF26B genetic sequence (SEQ ID NO: 4) or corresponding RNA or complementary sequence thereof.

[0058] Inhibition of agents as described herein can be determined by standard pharmaceutical procedures in assays or cell cultures for determining the IC₅₀. The half maximal inhibitory concentration (IC₅₀) is a measure of the potency of a substance in inhibiting a specific biological or biochemical function. The IC₅₀ is a quantitative measure that indicates how much of a particular inhibitory substance (e.g., pharmaceutical agent or drug) is needed to inhibit, in vitro, a given biological process or biological component by 50%. The biological component could be an enzyme, cell, cell receptor, or microorganism, for example. IC₅₀ values are typically expressed as molar concentration. IC₅₀ is generally used as a measure of antagonist drug potency in pharmacological research. IC₅₀ is comparable to other measures of potency, such as EC₅₀ for excitatory drugs. EC₅₀ represents the dose or plasma concentration required for obtaining 50% of a maximum effect in vivo. IC₅₀ can be determined with functional assays or with competition binding assays.

[0059] Molecular Engineering

[0060] The following definitions and methods are provided to better define the present invention and to guide those of ordinary skill in the art in the practice of the present invention. Unless otherwise noted, terms are to be understood according to conventional usage by those of ordinary skill in the relevant art.

[0061] The term “transfection,” as used herein, refers to the process of introducing nucleic acids into cells by non-viral methods. The term “transduction,” as used herein, refers to the process whereby foreign DNA is introduced into another cell via a viral vector.

[0062] The terms “heterologous DNA sequence”, “exogenous DNA segment”, or “heterologous nucleic acid,” as used herein, each refers to a sequence that originates from a source foreign to the particular host cell or, if from the same source, is modified from its original form. Thus, a heterologous gene in a host cell includes a gene that is endogenous to the particular host cell but has been modified through, for example, the use of DNA shuffling or cloning. The terms also include non-naturally occurring multiple copies of a naturally occurring DNA sequence. Thus, the terms refer to a DNA segment that is foreign or heterologous to the cell, or homologous to the cell but in a position within the host cell nucleic acid in which the element is not ordinarily found. Exogenous DNA segments are expressed to yield exogenous polypeptides. A “homologous” DNA sequence is a DNA sequence that is naturally associated with a host cell into which it is introduced.

[0063] Expression vector, expression construct, plasmid, or recombinant DNA construct is generally understood to refer to a nucleic acid that has been generated via human intervention, including by recombinant means or direct chemical synthesis, with a series of specified nucleic acid elements that permit transcription or translation of a particular nucleic acid in, for example, a host cell. The expression vector can be part of a plasmid, virus, or nucleic acid fragment. Typically, the expression vector can include a nucleic acid to be transcribed operably linked to a promoter.

[0064] An “expression vector”, otherwise known as an “expression construct”, is generally a plasmid or virus designed for gene expression in cells. The vector is used to introduce a specific gene into a target cell, and can commandeer the cell's mechanism for protein synthesis to produce the protein encoded by the gene. Expression vectors are the basic tools in biotechnology for the production of proteins. The vector is engineered to contain regulatory sequences that act as enhancer and/or promoter regions and lead to efficient transcription of the gene carried on the expression vector. The goal of a well-designed expression vector is the efficient production of protein, and this may be achieved by the production of a significant amount of stable messenger RNA, which can then be translated into protein. The expression of a protein may be tightly controlled, and the protein is only produced in significant quantity when necessary through the use of an inducer, in some systems however the protein may be expressed constitutively. As described herein, Escherichia coli is used as the host for protein production, but other cell types may also be used.

[0065] In molecular biology, an “inducer” is a molecule that regulates gene expression. An inducer can function in two ways, such as:

[0066] (i) By disabling repressors. The gene is expressed because an inducer binds to the repressor. The binding of the inducer to the repressor prevents the repressor from binding to the operator. RNA polymerase can then begin to transcribe operon genes.

[0067] (ii) By binding to activators. Activators generally bind poorly to activator DNA sequences unless an inducer is present. An activator binds to an inducer and the complex binds to the activation sequence and activates target gene. Removing the inducer stops transcription. Because a small inducer molecule is required, the increased expression of the target gene is called induction.

[0068] Repressor proteins bind to the DNA strand and prevent RNA polymerase from being able to attach to the DNA and synthesize mRNA. Inducers bind to repressors, causing them to change shape and preventing them from binding to DNA. Therefore, they allow transcription, and thus gene expression, to take place.

[0069] For a gene to be expressed, its DNA sequence must be copied (in a process known as transcription) to make a smaller, mobile molecule called messenger RNA (mRNA), which carries the instructions for making a protein to the site where the protein is manufactured (in a process known as translation). Many different types of proteins can affect the level of gene expression by promoting or preventing transcription. In prokaryotes (such as bacteria), these proteins often act on a portion of DNA known as the operator at the beginning of the gene. The promoter is where RNA polymerase, the enzyme that copies the genetic sequence and synthesizes the mRNA, attaches to the DNA strand.

[0070] Some genes are modulated by activators, which have the opposite effect on gene expression as repressors. Inducers can also bind to activator proteins, allowing them to bind to the operator DNA where they promote RNA transcription. Ligands that bind to deactivate activator proteins are not, in the technical sense, classified as inducers, since they have the effect of preventing transcription.

[0071] A “promoter” is generally understood as a nucleic acid control sequence that directs transcription of a nucleic acid. An inducible promoter is generally understood as a promoter that mediates transcription of an operably linked gene in response to a particular stimulus. A promoter can include necessary nucleic acid sequences near the start site of transcription, such as, in the case of a polymerase type promoter, a TATA element. A promoter can optionally include distal enhancer or repressor elements, which can be located as many as several thousand base pairs from the start site of transcription.

[0072] A “ribosome binding site”, or “ribosomal binding site (RBS)”, refers to a sequence of nucleotides upstream of the start codon of an mRNA transcript that is responsible for the recruitment of a ribosome during the initiation of translation. Generally, RBS refers to bacterial sequences, although internal ribosome entry sites (IRES) have been described in mRNAs of eukaryotic cells or viruses that infect eukaryotes. Ribosome recruitment in eukaryotes is generally mediated by the 5′ cap present on eukaryotic mRNAs.

[0073] A “transcribable nucleic acid molecule” as used herein refers to any nucleic acid molecule capable of being transcribed into an RNA molecule. Methods are known for introducing constructs into a cell in such a manner that the transcribable nucleic acid molecule is transcribed into a functional mRNA molecule that is translated and therefore expressed as a protein product. Constructs may also be constructed to be capable of expressing antisense RNA molecules, in order to inhibit translation of a specific RNA molecule of interest. For the practice of the present disclosure, conventional compositions and methods for preparing and using constructs and host cells are well known to one skilled in the art (see e.g., Sambrook and Russel (2006) Condensed Protocols from Molecular Cloning: A Laboratory Manual, Cold Spring Harbor Laboratory Press, ISBN-10: 0879697717; Ausubel et al. (2002) Short Protocols in Molecular Biology, 5th ed., Current Protocols, ISBN-10: 0471250929; Sambrook and Russel (2001) Molecular Cloning: A Laboratory Manual, 3d ed., Cold Spring Harbor Laboratory Press, ISBN-10: 0879695773; Elhai, J. and Wolk, C. P. 1988. Methods in Enzymology 167, 747-754).

[0074] The “transcription start site” or “initiation site” is the position surrounding the first nucleotide that is part of the transcribed sequence, which is also defined as position +1. With respect to this site, all other sequences of the gene and its controlling regions can be numbered. Downstream sequences (i.e., further protein encoding sequences in the 3′ direction) can be denominated positive, while upstream sequences (mostly of the controlling regions in the 5′ direction) are denominated negative.

[0075] “Operably-linked” or “functionally linked” refers preferably to the association of nucleic acid sequences on a single nucleic acid fragment so that the function of one is affected by the other. For example, a regulatory DNA sequence is said to be “operably linked to” or “associated with” a DNA sequence that codes for an RNA or a polypeptide if the two sequences are situated such that the regulatory DNA sequence affects expression of the coding DNA sequence (i.e., that the coding sequence or functional RNA is under the transcriptional control of the promoter). Coding sequences can be operably-linked to regulatory sequences in sense or antisense orientation. The two nucleic acid molecules may be part of a single contiguous nucleic acid molecule and may be adjacent. For example, a promoter is operably linked to a gene of interest if the promoter regulates or mediates transcription of the gene of interest in a cell.

[0076] A “construct” is generally understood as any recombinant nucleic acid molecule such as a plasmid, cosmid, virus, autonomously replicating nucleic acid molecule, phage, or linear or circular single-stranded or double-stranded DNA or RNA nucleic acid molecule, derived from any source, capable of genomic integration or autonomous replication, comprising a nucleic acid molecule where one or more nucleic acid molecule has been operably linked.

[0077] A construct of the present disclosure can contain a promoter operably linked to a transcribable nucleic acid molecule operably linked to a 3′ transcription termination nucleic acid molecule. In addition, constructs can include but are not limited to additional regulatory nucleic acid molecules from, e.g., the 3′-untranslated region (3′ UTR). Constructs can include but are not limited to the 5′ untranslated regions (5′ UTR) of an mRNA nucleic acid molecule which can play an important role in translation initiation and can also be a genetic component in an expression construct. These additional upstream and downstream regulatory nucleic acid molecules may be derived from a source that is native or heterologous with respect to the other elements present on the promoter construct.

[0078] The term “transformation” refers to the transfer of a nucleic acid fragment into the genome of a host cell, resulting in genetically stable inheritance. Host cells containing the transformed nucleic acid fragments are referred to as “transgenic” cells, and organisms comprising transgenic cells are referred to as “transgenic organisms”.

[0079] “Transformed,” “transgenic,” and “recombinant” refer to a host cell or organism such as a bacterium, cyanobacterium, animal, or a plant into which a heterologous nucleic acid molecule has been introduced. The nucleic acid molecule can be stably integrated into the genome as generally known in the art and disclosed (Sambrook 1989; Innis 1995; Gelfand 1995; Innis & Gelfand 1999). Known methods of PCR include, but are not limited to, methods using paired primers, nested primers, single specific primers, degenerate primers, gene-specific primers, vector-specific primers, partially mismatched primers, and the like. The term “untransformed” refers to normal cells that have not been through the transformation process.

[0080] “Wild-type” refers to a virus or organism found in nature without any known mutation.

[0081] Design, generation, and testing of the variant nucleotides, and their encoded polypeptides, having the above-required percent identities and retaining a required activity of the expressed protein are within the skill of the art. For example, directed evolution and rapid isolation of mutants can be according to methods described in references including, but not limited to, Link et al. (2007) Nature Reviews 5(9), 680-688; Sanger et al. (1991) Gene 97(1), 119-123; Ghadessy et al. (2001) Proc Natl Acad Sci USA 98(8) 4552-4557. Thus, one skilled in the art could generate a large number of nucleotide and/or polypeptide variants having, for example, at least 95-99% identity to the reference sequence described herein and screen such for desired phenotypes according to methods routine in the art.

[0082] Nucleotide and/or amino acid sequence identity percent (%) is understood as the percentage of nucleotide or amino acid residues that are identical with nucleotide or amino acid residues in a candidate sequence in comparison to a reference sequence when the two sequences are aligned. To determine percent identity, sequences are aligned and if necessary, gaps are introduced to achieve the maximum percent sequence identity. Sequence alignment procedures to determine percent identity are well known to those of skill in the art. Often publicly available computer software such as BLAST, BLAST2, ALIGN2, or Megalign (DNASTAR) software is used to align sequences. Those skilled in the art can determine appropriate parameters for measuring alignment, including any algorithms needed to achieve maximal alignment over the full-length of the sequences being compared. When sequences are aligned, the percent sequence identity of a given sequence A to, with, or against a given sequence B (which can alternatively be phrased as a given sequence A that has or comprises a certain percent sequence identity to, with, or against a given sequence B) can be calculated as: percent sequence identity=X/Y100, where X is the number of residues scored as identical matches by the sequence alignment program's or algorithm's alignment of A and B and Y is the total number of residues in B. If the length of sequence A is not equal to the length of sequence B, the percent sequence identity of A to B will not equal the percent sequence identity of B to A. For example, the percent identity can be at least 80% or about 80%, about 81%, about 82%, about 83%, about 84%, about 85%, about 86%, about 87%, about 88%, about 89%, about 90%, about 91%, about 92%, about 93%, about 94%, about 95%, about 96%, about 97%, about 98%, about 99%, or about 100%.

[0083] Substitution refers to the replacement of one amino acid with another amino acid in a protein or the replacement of one nucleotide with another in DNA or RNA. Insertion refers to the insertion of one or more amino acids in a protein or the insertion of one or more nucleotides with another in DNA or RNA. Deletion refers to the deletion of one or more amino acids in a protein or the deletion of one or more nucleotides with another in DNA or RNA. Generally, substitutions, insertions, or deletions can be made at any position so long as the required activity is retained.

[0084] So-called conservative exchanges can be carried out in which the amino acid which is replaced has a similar property as the original amino acid, for example, the exchange of Glu by Asp, Gln by Asn, Val by lie, Leu by lie, and Ser by Thr. For example, amino acids with similar properties can be Aliphatic amino acids (e.g., Glycine, Alanine, Valine, Leucine, Isoleucine); hydroxyl or sulfur/selenium-containing amino acids (e.g., Serine, Cysteine, Selenocysteine, Threonine, Methionine); Cyclic amino acids (e.g., Proline); Aromatic amino acids (e.g., Phenylalanine, Tyrosine, Tryptophan); Basic amino acids (e.g., Histidine, Lysine, Arginine); or Acidic and their Amide (e.g., Aspartate, Glutamate, Asparagine, Glutamine). Deletion is the replacement of an amino acid by a direct bond. Positions for deletions include the termini of a polypeptide and linkages between individual protein domains. Insertions are introductions of amino acids into the polypeptide chain, a direct bond formally being replaced by one or more amino acids. An amino acid sequence can be modulated with the help of art-known computer simulation programs that can produce a polypeptide with, for example, improved activity or altered regulation. On the basis of these artificially generated polypeptide sequences, a corresponding nucleic acid molecule coding for such a modulated polypeptide can be synthesized in-vitro using the specific codon-usage of the desired host cell.

[0085] “Highly stringent hybridization conditions” are defined as hybridization at 65° C. in a 6×SSC buffer (i.e., 0.9 M sodium chloride and 0.09 M sodium citrate). Given these conditions, a determination can be made as to whether a given set of sequences will hybridize by calculating the melting temperature (Tₘ) of a DNA duplex between the two sequences. If a particular duplex has a melting temperature lower than 65° C. in the salt conditions of a 6×SSC, then the two sequences will not hybridize. On the other hand, if the melting temperature is above 65° C. in the same salt conditions, then the sequences will hybridize. In general, the melting temperature for any hybridized DNA:DNA sequence can be determined using the following formula: Tₘ=81.5° C.+16.6(log₁₀[Na⁺])+0.41 (fraction G/C content)−0.63 (% formamide)−(600/l). Furthermore, the Tₘ of a DNA:DNA hybrid is decreased by 1-1.5° C. for every 1% decrease in nucleotide identity (see e.g., Sambrook and Russel, 2006).

[0086] Host cells can be transformed using a variety of standard techniques known to the art (see e.g., Sambrook and Russel (2006) Condensed Protocols from Molecular Cloning: A Laboratory Manual, Cold Spring Harbor Laboratory Press, ISBN-10: 0879697717; Ausubel et al. (2002) Short Protocols in Molecular Biology, 5th ed., Current Protocols, ISBN-10: 0471250929; Sambrook and Russel (2001) Molecular Cloning: A Laboratory Manual, 3d ed., Cold Spring Harbor Laboratory Press, ISBN-10: 0879695773; Elhai, J. and Wolk, C. P. 1988. Methods in Enzymology 167, 747-754). Such techniques include, but are not limited to, viral infection, calcium phosphate transfection, liposome-mediated transfection, microprojectile-mediated delivery, receptor-mediated uptake, cell fusion, electroporation, and the like. The transformed cells can be selected and propagated to provide recombinant host cells that comprise the expression vector stably integrated in the host cell genome.

Conservative Substitutions I

| Side Chain Characteristic | Amino Acid |
|---|---|
| Aliphatic Non-polar | G A P I L V |
| Polar-uncharged | C S T M N Q |
| Polar-charged | D E K R |
| Aromatic | H F W Y |
| Other | N Q D E |

Conservative Substitutions II

| Side Chain Characteristic | Amino Acid |
|---|---|
| Non-polar (hydrophobic) | |
| A. Aliphatic: | A L I V P |
| B. Aromatic: | F W |
| C. Sulfur-containing: | M |
| D. Borderline: | G |
| Uncharged-polar | |
| A. Hydroxyl: | S T Y |
| B. Amides: | N Q |
| C. Sulfhydryl: | C |
| D. Borderline: | G |
| Positively Charged (Basic): | K R H |
| Negatively Charged (Acidic): | D E |

Conservative Substitutions III

| Original Residue | Exemplary Substitution |
|---|---|
| Ala (A) | Val, Leu, Ile |
| Arg (R) | Lys, Gln, Asn |
| Asn (N) | Gln, His, Lys, Arg |
| Asp (D) | Glu |
| Cys (C) | Ser |
| Gln (Q) | Asn |
| Glu (E) | Asp |
| His (H) | Asn, Gln, Lys, Arg |
| Ile (I) | Leu, Val, Met, Ala, Phe, |
| Leu (L) | Ile, Val, Met, Ala, Phe |
| Lys (K) | Arg, Gln, Asn |
| Met (M) | Leu, Phe, Ile |
| Phe (F) | Leu, Val, Ile, Ala |
| Pro (P) | Gly |
| Ser (S) | Thr |
| Thr (T) | Ser |
| Trp (W) | Tyr, Phe |
| Tyr (Y) | Trp, Phe, Tur, Ser |
| Val (V) | Ile, Leu, Met, Phe, Ala |

[0087] Exemplary nucleic acids that may be introduced to a host cell include, for example, DNA sequences or genes from another species, or even genes or sequences which originate with or are present in the same species, but are incorporated into recipient cells by genetic engineering methods. The term “exogenous” is also intended to refer to genes that are not normally present in the cell being transformed, or perhaps simply not present in the form, structure, etc., as found in the transforming DNA segment or gene, or genes which are normally present and that one desires to express in a manner that differs from the natural expression pattern, e.g., to over-express. Thus, the term “exogenous” gene or DNA is intended to refer to any gene or DNA segment that is introduced into a recipient cell, regardless of whether a similar gene may already be present in such a cell. The type of DNA included in the exogenous DNA can include DNA that is already present in the cell, DNA from another individual of the same type of organism, DNA from a different organism, or a DNA generated externally, such as a DNA sequence containing an antisense message of a gene, or a DNA sequence encoding a synthetic or modified version of a gene.

[0088] Host strains developed according to the approaches described herein can be evaluated by a number of means known in the art (see e.g., Studier (2005) Protein Expr Purif. 41(1), 207-234; Gellissen, ed. (2005) Production of Recombinant Proteins: Novel Microbial and Eukaryotic Expression Systems, Wiley-VCH, ISBN-10: 3527310363; Baneyx (2004) Protein Expression Technologies, Taylor & Francis, ISBN-10: 0954523253).

[0089] Methods of down-regulation or silencing genes are known in the art. For example, expressed protein activity can be down-regulated or eliminated using antisense oligonucleotides (ASOs), protein aptamers, nucleotide aptamers, and RNA interference (RNAi) (e.g., small interfering RNAs (siRNA), short hairpin RNA (shRNA), and micro RNAs (miRNA) (see e.g., Rinaldi and Wood (2017) Nature Reviews Neurology 14, describing ASO therapies; Fanning and Symonds (2006) Handb Exp Pharmacol. 173, 289-303G, describing hammerhead ribozymes and small hairpin RNA; Helene, et al. (1992) Ann. N.Y. Acad. Sci. 660, 27-36; Maher (1992) Bioassays 14(12): 807-15, describing targeting deoxyribonucleotide sequences; Lee et al. (2006) Curr Opin Chem Biol. 10, 1-8, describing aptamers; Reynolds et al. (2004) Nature Biotechnology 22(3), 326-330, describing RNAi; Pushparaj and Melendez (2006) Clinical and Experimental Pharmacology and Physiology 33(5-6), 504-510, describing RNAi; Dillon et al. (2005) Annual Review of Physiology 67, 147-173, describing RNAi; Dykxhoorn and Lieberman (2005) Annual Review of Medicine 56, 401-423, describing RNAi). RNAi molecules are commercially available from a variety of sources (e.g., Ambion, Tex.; Sigma Aldrich, Mo.; Invitrogen). Several siRNA molecule design programs using a variety of algorithms are known to the art (see e.g., Cenix algorithm, Ambion; BLOCK-iT™ RNAi Designer, Invitrogen; siRNA Whitehead Institute Design Tools, Bioinformatics & Research Computing). Traits influential in defining optimal siRNA sequences include G/C content at the termini of the siRNAs, Tm of specific internal domains of the siRNA, siRNA length, position of the target sequence within the CDS (coding region), and nucleotide content of the 3′ overhangs.

[0090] Genome Editing

[0091] As described herein, KIF26B signals can be modulated (e.g., reduced, eliminated, or enhanced) using genome editing. Processes for genome editing are well known; see e.g. Aldi 2018 Nature Communications 9(1911). Except as otherwise noted herein, therefore, the process of the present disclosure can be carried out in accordance with such processes.

[0092] For example, genome editing can comprise CRISPR/Cas9, CRISPR-Cpf1, TALEN, or ZNFs. Adequate blockage of KIF26B by genome editing can result in protection from ectopic intra-articular ossification.

[0093] As an example, clustered regularly interspaced short palindromic repeats (CRISPR)/CRISPR-associated (Cas) systems are a new class of genome-editing tools that target desired genomic sites in mammalian cells. Recently published type II CRISPR/Cas systems use Cas9 nuclease that is targeted to a genomic site by complexing with a synthetic guide RNA that hybridizes to a 20-nucleotide DNA sequence and immediately preceding an NGG motif recognized by Cas9 (thus, a (N)₂₀ NGG target DNA sequence). This results in a double-strand break three nucleotides upstream of the NGG motif. The double strand break instigates either non-homologous end-joining, which is error-prone and conducive to frameshift mutations that knock out gene alleles, or homology-directed repair, which can be exploited with the use of an exogenously introduced double-strand or single-strand DNA repair template to knock in or correct a mutation in the genome.

[0094] For example, the methods as described herein can comprise a method for altering a target polynucleotide sequence in a cell comprising contacting the polynucleotide sequence with a clustered regularly interspaced short palindromic repeats-associated (Cas) protein.

[0095] As shown herein, lentivirus was used as the vector for shRNA. Any vector known in the art can be used. For example, the vector can be a viral vector selected from retrovirus, lentivirus, herpes, adenovirus, adeno-associated virus (AAV), rabies, Ebola, lentivirus, or hybrids thereof.

Strategy

Viral Vectors

| | |
|---|---|
| Retroviruses | Retroviruses are RNA viruses |
| | transcribing their single-stranded |
| | genome into a double-stranded |
| | DNA copy, which can integrate |
| | into host chromosome |
| Adenoviruses (Ad) | Ad can transfect a variety of |
| | quiescent and proliferating |
| | cell types from various |
| | species and can mediate |
| | robust gene expression |
| Adeno-associated | Recombinant AAV vectors contain |
| Viruses (AAV) | no viral DNA and can carry ~4.7 |
| | kb of foreign transgenic material. |
| | They are replication defective |
| | and can replicate only while |
| | coinfecting with a helper virus |

Non-viral vectors

| | |
|---|---|
| plasmid DNA | pDNA has many desired |
| (pDNA) | characteristics as a gene |
| | therapy vector; there are no |
| | limits on the size or genetic |
| | constitution of DNA, it is |
| | relatively inexpensive to supply, |
| | and unlike viruses, |
| | antibodies are not generated |
| | against DNA in normal individuals |
| RNAi | RNAi is a powerful tool for |
| | gene specific silencing that |
| | could be useful as an |
| | enzyme reduction therapy or |
| | means to promote read-through |
| | of a premature stop codon |

[0096] Formulation

[0097] The agents and compositions described herein can be formulated by any conventional manner using one or more pharmaceutically acceptable carriers or excipients as described in, for example, Remington's Pharmaceutical Sciences (A. R. Gennaro, Ed.), 21st edition, ISBN: 0781746736 (2005), incorporated herein by reference in its entirety. Such formulations will contain a therapeutically effective amount of a biologically active agent described herein, which can be in purified form, together with a suitable amount of carrier so as to provide the form for proper administration to the subject.

[0098] The term “formulation” refers to preparing a drug in a form suitable for administration to a subject, such as a human. Thus, a “formulation” can include pharmaceutically acceptable excipients, including diluents or carriers.

[0099] The term “pharmaceutically acceptable” as used herein can describe substances or components that do not cause unacceptable losses of pharmacological activity or unacceptable adverse side effects. Examples of pharmaceutically acceptable ingredients can be those having monographs in United States Pharmacopeia (USP 29) and National Formulary (NF 24), United States Pharmacopeial Convention, Inc, Rockville, Md., 2005 (“USP/NF”), or a more recent edition, and the components listed in the continuously updated Inactive Ingredient Search online database of the FDA. Other useful components that are not described in the USP/NF, etc. may also be used.

[0100] The term “pharmaceutically acceptable excipient,” as used herein, can include any and all solvents, dispersion media, coatings, antibacterial and antifungal agents, isotonic, or absorption delaying agents. The use of such media and agents for pharmaceutically active substances is well known in the art (see generally Remington's Pharmaceutical Sciences (A. R. Gennaro, Ed.), 21st edition, ISBN: 0781746736 (2005)). Except insofar as any conventional media or agent is incompatible with an active ingredient, its use in the therapeutic compositions is contemplated. Supplementary active ingredients can also be incorporated into the compositions.

[0101] A “stable” formulation or composition can refer to a composition having sufficient stability to allow storage at a convenient temperature, such as between about 0° C. and about 60° C., for a commercially reasonable period of time, such as at least about one day, at least about one week, at least about one month, at least about three months, at least about six months, at least about one year, or at least about two years.

[0102] The formulation should suit the mode of administration. The agents of use with the current disclosure can be formulated by known methods for administration to a subject using several routes which include, but are not limited to, parenteral, pulmonary, oral, topical, intradermal, intratumoral, intranasal, inhalation (e.g., in an aerosol), implanted, intramuscular, intraperitoneal, intravenous, intrathecal, intracranial, intracerebroventricular, subcutaneous, intranasal, epidural, intrathecal, ophthalmic, transdermal, buccal, and rectal. The individual agents may also be administered in combination with one or more additional agents or together with other biologically active or biologically inert agents. Such biologically active or inert agents may be in fluid or mechanical communication with the agent(s) or attached to the agent(s) by ionic, covalent, Van der Waals, hydrophobic, hydrophilic, or other physical forces.

[0103] Controlled-release (or sustained-release) preparations may be formulated to extend the activity of the agent(s) and reduce dosage frequency. Controlled-release preparations can also be used to affect the time of onset of action or other characteristics, such as blood levels of the agent, and consequently, affect the occurrence of side effects. Controlled-release preparations may be designed to initially release an amount of an agent(s) that produces the desired therapeutic effect, and gradually and continually release other amounts of the agent to maintain the level of therapeutic effect over an extended period of time. In order to maintain a near-constant level of an agent in the body, the agent can be released from the dosage form at a rate that will replace the amount of agent being metabolized or excreted from the body. The controlled-release of an agent may be stimulated by various inducers, e.g., change in pH, change in temperature, enzymes, water, or other physiological conditions or molecules.

[0104] Agents or compositions described herein can also be used in combination with other therapeutic modalities, as described further below. Thus, in addition to the therapies described herein, one may also provide to the subject other therapies known to be efficacious for treatment of the disease, disorder, or condition.

[0105] Therapeutic Methods

[0106] Also provided is a process of treating or preventing pathologic calcification or bone formation in a subject in need of administration of a therapeutically effective amount of a synthetic nucleic acid against KIF26B, so as to reduce KIF26B mRNA or protein expression, reduce or prevent osteogenesis, increase chondrogenesis, reduce expression of osteogenic marker genes, increase expression of chondrogenic marker genes, reduces expression of Wnt/β-catenin pathway genes, reduce cell proliferation or viability, induce cell apoptosis, or reduce or prevent ectopic calcification or formation of calcified nodules.

[0107] Methods described herein are generally performed on a subject in need thereof. A subject in need of the therapeutic methods described herein can be a subject having, diagnosed with, suspected of having, or at risk for developing pathologic calcification or bone formation. A determination of the need for treatment will typically be assessed by a history, physical exam, or diagnostic tests consistent with the disease or condition at issue. Diagnosis of the various conditions treatable by the methods described herein is within the skill of the art. The subject can be an animal subject, including a mammal, such as horses, cows, dogs, cats, sheep, pigs, mice, rats, monkeys, hamsters, guinea pigs, and humans or chickens. For example, the subject can be a human subject.

[0108] Generally, a safe and effective amount of a synthetic nucleic acid against KIF26B is, for example, an amount that would cause the desired therapeutic effect in a subject while minimizing undesired side effects. In various embodiments, an effective amount of a synthetic nucleic acid against KIF26B described herein can substantially inhibit pathologic calcification or bone formation, slow the progress of pathologic calcification or bone formation, or limit the development of pathologic calcification or bone formation.

[0109] According to the methods described herein, administration can be parenteral, pulmonary, oral, topical, intradermal, intramuscular, intraperitoneal, intravenous, intratumoral, intrathecal, intracranial, intracerebroventricular, subcutaneous, intranasal, epidural, ophthalmic, buccal, or rectal administration.

[0110] When used in the treatments described herein, a therapeutically effective amount of a synthetic nucleic acid against KIF26B can be employed in pure form or, where such forms exist, in pharmaceutically acceptable salt form and with or without a pharmaceutically acceptable excipient. For example, the compounds of the present disclosure can be administered, at a reasonable benefit/risk ratio applicable to any medical treatment, in a sufficient amount to reduce KIF26B mRNA or protein expression, reduce or prevent osteogenesis, increase chondrogenesis, reduce expression of osteogenic marker genes, increase expression of chondrogenic marker genes, reduces expression of Wnt/β-catenin pathway genes, reduce cell proliferation or viability, induce cell apoptosis, or reduce or prevent ectopic calcification or formation of calcified nodules.

[0111] The amount of a composition described herein that can be combined with a pharmaceutically acceptable carrier to produce a single dosage form will vary depending upon the subject or host treated and the particular mode of administration. It will be appreciated by those skilled in the art that the unit content of agent contained in an individual dose of each dosage form need not in itself constitute a therapeutically effective amount, as the necessary therapeutically effective amount could be reached by administration of a number of individual doses.

[0112] Toxicity and therapeutic efficacy of compositions described herein can be determined by standard pharmaceutical procedures in cell cultures or experimental animals for determining the LD₅₀ (the dose lethal to 50% of the population) and the ED₅₀, (the dose therapeutically effective in 50% of the population). The dose ratio between toxic and therapeutic effects is the therapeutic index that can be expressed as the ratio LD₅₀/ED₅₀, where larger therapeutic indices are generally understood in the art to be optimal.

[0113] The specific therapeutically effective dose level for any particular subject will depend upon a variety of factors including the disorder being treated and the severity of the disorder; the activity of the specific compound employed; the specific composition employed; the age, body weight, general health, sex and diet of the subject; the time of administration; the route of administration; the rate of excretion of the composition employed; the duration of the treatment; drugs used in combination or coincidental with the specific compound employed; and like factors well known in the medical arts (see e.g., Koda-Kimble et al. (2004) Applied Therapeutics: The Clinical Use of Drugs, Lippincott Williams & Wilkins, ISBN 0781748453; Winter (2003) Basic Clinical Pharmacokinetics, 4^{th} ed., Lippincott Williams & Wilkins, ISBN 0781741475; Sharqel (2004) Applied Biopharmaceutics & Pharmacokinetics, McGraw-Hill/Appleton & Lange, ISBN 0071375503). For example, it is well within the skill of the art to start doses of the composition at levels lower than those required to achieve the desired therapeutic effect and to gradually increase the dosage until the desired effect is achieved. If desired, the effective daily dose may be divided into multiple doses for purposes of administration. Consequently, single dose compositions may contain such amounts or submultiples thereof to make up the daily dose. It will be understood, however, that the total daily usage of the compounds and compositions of the present disclosure will be decided by an attending physician within the scope of sound medical judgment.

[0114] Again, each of the states, diseases, disorders, and conditions, described herein, as well as others, can benefit from the compositions and methods described herein. Generally, treating a state, disease, disorder, or condition includes preventing, reversing, or delaying the appearance of clinical symptoms in a mammal that may be afflicted with or predisposed to the state, disease, disorder, or condition but does not yet experience or display clinical or subclinical symptoms thereof. Treating can also include inhibiting the state, disease, disorder, or condition, e.g., arresting or reducing the development of the disease or at least one clinical or subclinical symptom thereof. Furthermore, treating can include relieving the disease, e.g., causing regression of the state, disease, disorder, or condition or at least one of its clinical or subclinical symptoms. A benefit to a subject to be treated can be either statistically significant or at least perceptible to the subject or a physician.

[0115] Administration of a synthetic nucleic acid against KIF26B can occur as a single event or over a time course of treatment. For example, a synthetic nucleic acid against KIF26B can be administered daily, weekly, bi-weekly, or monthly. For treatment of acute conditions, the time course of treatment will usually be at least several days. Certain conditions could extend treatment from several days to several weeks. For example, treatment could extend over one week, two weeks, or three weeks. For more chronic conditions, treatment could extend from several weeks to several months or even a year or more.

[0116] Treatment in accord with the methods described herein can be performed prior to or before, concurrent with, or after conventional treatment modalities for pathologic calcification or bone formation.

[0117] A synthetic nucleic acid against KIF26B can be administered simultaneously or sequentially with another agent, such as an antibiotic, an anti-inflammatory, or another agent. For example, a synthetic nucleic acid against KIF26B can be administered simultaneously with another agent, such as an antibiotic or an anti-inflammatory. Simultaneous administration can occur through administration of separate compositions, each containing one or more of a synthetic nucleic acid against KIF26B, an antibiotic, an anti-inflammatory, or another agent. Simultaneous administration can occur through administration of one composition containing two or more of a synthetic nucleic acid against KIF26B, an antibiotic, an anti-inflammatory, or another agent. A synthetic nucleic acid against KIF26B can be administered sequentially with an antibiotic, an anti-inflammatory, or another agent. For example, a synthetic nucleic acid against KIF26B can be administered before or after administration of an antibiotic, an anti-inflammatory, or another agent.

[0118] Active compounds are administered at a therapeutically effective dosage sufficient to treat a condition associated with a condition in a patient. For example, the efficacy of a compound can be evaluated in an animal model system that may be predictive of efficacy in treating the disease in a human or another animal, such as the model systems shown in the examples and drawings.

[0119] An effective dose range of a therapeutic can be extrapolated from effective doses determined in animal studies for a variety of different animals. In general, a human equivalent dose (HED) in mg/kg can be calculated in accordance with the following formula (see e.g., Reagan-Shaw et al., FASEB J., 22(3):659-661, 2008, which is incorporated herein by reference):

HED (mg/kg)=Animal dose (mg/kg)×(Animal Kₘ/Human Kₘ)

[0120] Use of the Kₘ factors in conversion results in more accurate HED values, which are based on body surface area (BSA) rather than only on body mass. Kₘ values for humans and various animals are well known. For example, the Kₘ for an average 60 kg human (with a BSA of 1.6 m²) is 37, whereas a 20 kg child (BSA 0.8 m²) would have a Kₘ of 25. Kₘ for some relevant animal models are also well known, including: mice Kₘ of 3 (given a weight of 0.02 kg and BSA of 0.007); hamster Kₘ of 5 (given a weight of 0.08 kg and BSA of 0.02); rat Kₘ of 6 (given a weight of 0.15 kg and BSA of 0.025) and monkey Kₘ of 12 (given a weight of 3 kg and BSA of 0.24).

[0121] Precise amounts of the therapeutic composition depend on the judgment of the practitioner and are peculiar to each individual. Nonetheless, a calculated HED dose provides a general guide. Other factors affecting the dose include the physical and clinical state of the patient, the route of administration, the intended goal of treatment, and the potency, stability, and toxicity of the particular therapeutic formulation.

[0122] The actual dosage amount of a compound of the present disclosure or composition comprising a compound of the present disclosure administered to a subject may be determined by physical and physiological factors such as type of animal treated, age, sex, body weight, severity of condition, the type of disease being treated, previous or concurrent therapeutic interventions, idiopathy of the subject and on the route of administration. These factors may be determined by a skilled artisan. The practitioner responsible for administration will typically determine the concentration of active ingredient(s) in a composition and appropriate dose(s) for the individual subject. The dosage may be adjusted by the individual physician in the event of any complication.

[0123] In some embodiments, the synthetic nucleic acid against KIF26B may be administered in an amount from about 1 mg/kg to about 100 mg/kg, or about 1 mg/kg to about 50 mg/kg, or about 1 mg/kg to about 25 mg/kg, or about 1 mg/kg to about 15 mg/kg, or about 1 mg/kg to about 10 mg/kg, or about 1 mg/kg to about 5 mg/kg, or about 3 mg/kg. In some embodiments, a synthetic nucleic acid against KIF26B such as described herein may be administered in a range of about 1 mg/kg to about 200 mg/kg, or about 50 mg/kg to about 200 mg/kg, or about 50 mg/kg to about 100 mg/kg, or about 75 mg/kg to about 100 mg/kg, or about 100 mg/kg.

[0124] The effective amount may be less than 1 mg/kg/day, less than 500 mg/kg/day, less than 250 mg/kg/day, less than 100 mg/kg/day, less than 50 mg/kg/day, less than 25 mg/kg/day or less than 10 mg/kg/day. It may alternatively be in the range of 1 mg/kg/day to 200 mg/kg/day.

[0125] In other non-limiting examples, a dose may also comprise from about 1 microgram/kg/body weight, about 5 microgram/kg/body weight, about 10 microgram/kg/body weight, about 50 microgram/kg/body weight, about 100 microgram/kg/body weight, about 200 microgram/kg/body weight, about 350 microgram/kg/body weight, about 500 microgram/kg/body weight, about 1 milligram/kg/body weight, about 5 milligram/kg/body weight, about 10 milligram/kg/body weight, about 50 milligram/kg/body weight, about 100 milligram/kg/body weight, about 200 milligram/kg/body weight, about 350 milligram/kg/body weight, about 500 milligram/kg/body weight, to about 1000 mg/kg/body weight or more per administration, and any range derivable therein. In non-limiting examples of a derivable range from the numbers listed herein, a range of about 5 mg/kg/body weight to about 100 mg/kg/body weight, about 5 microgram/kg/body weight to about 500 milligram/kg/body weight, etc., can be administered, based on the numbers described above.

[0126] Pathologic Calcification and Bone Formation

[0127] One aspect of the present disclosure provides for methods of treating or preventing diseases, disorders, or conditions associated with pathologic calcification or pathologic bone formation. As described herein, administration of a synthetic nucleic acid targeting KIF26B inhibited osteogenesis and expression of osteogenic marker genes, leading to a reduction in ectopic calcification and formation of ossified nodules (see e.g., Example 1).

[0128] As an example, the methods described herein may be used to treat or prevent ectopic calcification. Ectopic calcification, also referred to as acquired calcification or intra-articular ectopic calcification, is an osteogenic process that leads to the formation of bone within intra-articular soft tissues. Ectopic calcification may result from osteogenesis after injury to a tissue (e.g., injury-induced) or after a surgical procedure (e.g., surgery-induced). As described herein, intra-articular ectopic calcification may appear as intra-articular nodules in the synovium or capsule of a joint. It can severely affect the joint and is often recalcitrant to therapy.

[0129] The methods described herein may be used to treat or prevent pathologic calcification or bone formation occurring within any joint or intra-articular space. For example, the joint can be a knee, elbow, hip, shoulder, neck, jaw, ankle, wrist, spine, finger, hand, ankle, toe, or foot joint.

[0130] As another example, the methods described herein may be used to treat or prevent heterotopic ossification, a form of calcification in soft tissues such as muscles and tendons. Heterotopic ossification may occur in response to musculoskeletal trauma, such as a fracture, arthroplasty, or other traumatic injury, or after a neurogenic injury such as a stroke or traumatic brain injury. Heterotopic ossification may occur at any site involved in a trauma or injury, but most commonly occurs, for example, at the elbow, thigh, pelvis, shoulder, head, neck, fingers, or skin.

[0131] Any disease, disorder, or condition mediated by pathologic calcification or pathologic bone formation may be treated or prevented using the methods described herein. For example, the disease, disorder, or condition may be pathologic osteogenesis, orthotopic ossification, osteoarthritis, osteosclerosis, spondyloarthropathy, diffuse idiopathic skeletal hyperostosis, crystal-induced arthropathies, ossification of the posterior longitudinal ligament, myositis ossificans, drug-induced ossification, fibrodysplasia ossificans progressive, synovial endochromatosis, hyperparathyroidism, para-articular ossification, or ochronosis.

[0132] Administration

[0133] Agents and compositions described herein can be administered according to methods described herein in a variety of means known to the art. The agents and composition can be used therapeutically either as exogenous materials or as endogenous materials. Exogenous agents are those produced or manufactured outside of the body and administered to the body. Endogenous agents are those produced or manufactured inside the body by some type of device (biologic or other) for delivery within or to other organs in the body.

[0134] As discussed above, administration can be intra-articular, parenteral, pulmonary, oral, topical, intradermal, intratumoral, intranasal, inhalation (e.g., in an aerosol), implanted, intramuscular, intraperitoneal, intravenous, intrathecal, intracranial, intracerebroventricular, subcutaneous, intranasal, epidural, intrathecal, ophthalmic, transdermal, buccal, and rectal.

[0135] In some preferred embodiments, administration can be intra-articular. As described herein, intra-articular delivery of KIF26B shRNA into the knee joint of an injury-induced ectopic calcification mouse model effectively suppressed the expression of KIF26B protein and reduced the number of calcified nodules.

[0136] Intra-articular delivery targets all cells within the synovial joint, so the therapeutic effect of the synthetic nucleic acid against KIF26B is not specific to any one cell type. For example, the synthetic nucleic acid may exert a therapeutic effect on progenitor cells, stem cells, ACL-derived progenitor cells, mesenchymal stem cells, myoblasts, stromal cells, pericytes, or immune cells.

[0137] Agents and compositions described herein can be administered in a variety of methods well known in the arts. Administration can include, for example, methods involving oral ingestion, direct injection (e.g., systemic or stereotactic), implantation of cells engineered to secrete the factor of interest, drug-releasing biomaterials, polymer matrices, gels, permeable membranes, osmotic systems, multilayer coatings, microparticles, implantable matrix devices, mini-osmotic pumps, implantable pumps, injectable gels and hydrogels, liposomes, micelles (e.g., up to 30 μm), nanospheres (e.g., less than 1 μm), microspheres (e.g., 1-100 μm), reservoir devices, a combination of any of the above, or other suitable delivery vehicles to provide the desired release profile in varying proportions. Other methods of controlled-release delivery of agents or compositions will be known to the skilled artisan and are within the scope of the present disclosure.

[0138] Delivery systems may include, for example, an infusion pump which may be used to administer the agent or composition in a manner similar to that used for delivering insulin or chemotherapy to specific organs or tumors. Typically, using such a system, an agent or composition can be administered in combination with a biodegradable, biocompatible polymeric implant that releases the agent over a controlled period of time at a selected site. Examples of polymeric materials include polyanhydrides, polyorthoesters, polyglycolic acid, polylactic acid, polyethylene vinyl acetate, and copolymers and combinations thereof. In addition, a controlled release system can be placed in proximity of a therapeutic target, thus requiring only a fraction of a systemic dosage.

[0139] Agents can be encapsulated and administered in a variety of carrier delivery systems. Examples of carrier delivery systems include microspheres, hydrogels, polymeric implants, smart polymeric carriers, and liposomes (see generally, Uchegbu and Schatzlein, eds. (2006) Polymers in Drug Delivery, CRC, ISBN-10: 0849325331). Carrier-based systems for molecular or biomolecular agent delivery can: provide for intracellular delivery; tailor biomolecule/agent release rates; increase the proportion of biomolecule that reaches its site of action; improve the transport of the drug to its site of action; allow colocalized deposition with other agents or excipients; improve the stability of the agent in vivo; prolong the residence time of the agent at its site of action by reducing clearance; decrease the nonspecific delivery of the agent to nontarget tissues; decrease irritation caused by the agent; decrease toxicity due to high initial doses of the agent; alter the immunogenicity of the agent; decrease dosage frequency; improve taste of the product; or improve shelf life of the product.

[0140] Kits

[0141] Also provided are kits. Such kits can include an agent or composition described herein and, in certain embodiments, instructions for administration. Such kits can facilitate performance of the methods described herein. When supplied as a kit, the different components of the composition can be packaged in separate containers and admixed immediately before use. Components include, but are not limited to synthetic nucleic acids against KIF26B, lentiviruses, or other expression vectors. Such packaging of the components separately can, if desired, be presented in a pack or dispenser device which may contain one or more unit dosage forms containing the composition. The pack may, for example, comprise metal or plastic foil such as a blister pack. Such packaging of the components separately can also, in certain instances, permit long-term storage without losing activity of the components.

[0142] Kits may also include reagents in separate containers such as, for example, sterile water or saline to be added to a lyophilized active component packaged separately. For example, sealed glass ampules may contain a lyophilized component and in a separate ampule, sterile water or sterile saline each of which has been packaged under a neutral non-reacting gas, such as nitrogen. Ampules may consist of any suitable material, such as glass, organic polymers, such as polycarbonate, polystyrene, ceramic, metal, or any other material typically employed to hold reagents. Other examples of suitable containers include bottles that may be fabricated from similar substances as ampules and envelopes that may consist of foil-lined interiors, such as aluminum or an alloy. Other containers include test tubes, vials, flasks, bottles, syringes, and the like. Containers may have a sterile access port, such as a bottle having a stopper that can be pierced by a hypodermic injection needle. Other containers may have two compartments that are separated by a readily removable membrane that upon removal permits the components to mix. Removable membranes may be glass, plastic, rubber, and the like.

[0143] In certain embodiments, kits can be supplied with instructional materials. Instructions may be printed on paper or another substrate, and/or may be supplied as an electronic-readable medium or video. Detailed instructions may not be physically associated with the kit, instead, a user may be directed to an Internet web site specified by the manufacturer or distributor of the kit.

[0144] A control sample or a reference sample as described herein can be a sample from a healthy subject or sample, a wild-type subject or sample, or from populations thereof. A reference value can be used in place of a control or reference sample, which was previously obtained from a healthy subject or a group of healthy subjects or a wild-type subject or sample. A control sample or a reference sample can also be a sample with a known amount of a detectable compound or a spiked sample.

[0145] Compositions and methods described herein utilizing molecular biology protocols can be according to a variety of standard techniques known to the art (see e.g., Sambrook and Russel (2006) Condensed Protocols from Molecular Cloning: A Laboratory Manual, Cold Spring Harbor Laboratory Press, ISBN-10: 0879697717; Ausubel et al. (2002) Short Protocols in Molecular Biology, 5th ed., Current Protocols, ISBN-10: 0471250929; Sambrook and Russel (2001) Molecular Cloning: A Laboratory Manual, 3d ed., Cold Spring Harbor Laboratory Press, ISBN-10: 0879695773; Elhai, J. and Wolk, C. P. 1988. Methods in Enzymology 167, 747-754; Studier (2005) Protein Expr Purif. 41(1), 207-234; Gellissen, ed. (2005) Production of Recombinant Proteins: Novel Microbial and Eukaryotic Expression Systems, Wiley-VCH, ISBN-10: 3527310363; Baneyx (2004) Protein Expression Technologies, Taylor & Francis, ISBN-10: 0954523253).

[0146] Definitions and methods described herein are provided to better define the present disclosure and to guide those of ordinary skill in the art in the practice of the present disclosure. Unless otherwise noted, terms are to be understood according to conventional usage by those of ordinary skill in the relevant art.

[0147] In some embodiments, numbers expressing quantities of ingredients, properties such as molecular weight, reaction conditions, and so forth, used to describe and claim certain embodiments of the present disclosure are to be understood as being modified in some instances by the term “about.” In some embodiments, the term “about” is used to indicate that a value includes the standard deviation of the mean for the device or method being employed to determine the value. In some embodiments, the numerical parameters set forth in the written description and attached claims are approximations that can vary depending upon the desired properties sought to be obtained by a particular embodiment. In some embodiments, the numerical parameters should be construed in light of the number of reported significant digits and by applying ordinary rounding techniques. Notwithstanding that the numerical ranges and parameters setting forth the broad scope of some embodiments of the present disclosure are approximations, the numerical values set forth in the specific examples are reported as precisely as practicable. The numerical values presented in some embodiments of the present disclosure may contain certain errors necessarily resulting from the standard deviation found in their respective testing measurements. The recitation of ranges of values herein is merely intended to serve as a shorthand method of referring individually to each separate value falling within the range. Unless otherwise indicated herein, each individual value is incorporated into the specification as if it were individually recited herein. The recitation of discrete values is understood to include ranges between each value.

[0148] In some embodiments, the terms “a” and “an” and “the” and similar references used in the context of describing a particular embodiment (especially in the context of certain of the following claims) can be construed to cover both the singular and the plural, unless specifically noted otherwise. In some embodiments, the term “or” as used herein, including the claims, is used to mean “and/or” unless explicitly indicated to refer to alternatives only or the alternatives are mutually exclusive.

[0149] The terms “comprise,” “have” and “include” are open-ended linking verbs. Any forms or tenses of one or more of these verbs, such as “comprises,” “comprising,” “has,” “having,” “includes” and “including,” are also open-ended. For example, any method that “comprises,” “has” or “includes” one or more steps is not limited to possessing only those one or more steps and can also cover other unlisted steps. Similarly, any composition or device that “comprises,” “has” or “includes” one or more features is not limited to possessing only those one or more features and can cover other unlisted features.

[0150] All methods described herein can be performed in any suitable order unless otherwise indicated herein or otherwise clearly contradicted by context. The use of any and all examples, or exemplary language (e.g., “such as”) provided with respect to certain embodiments herein is intended merely to better illuminate the present disclosure and does not pose a limitation on the scope of the present disclosure otherwise claimed. No language in the specification should be construed as indicating any non-claimed element essential to the practice of the present disclosure.

[0151] Groupings of alternative elements or embodiments of the present disclosure disclosed herein are not to be construed as limitations. Each group member can be referred to and claimed individually or in any combination with other members of the group or other elements found herein. One or more members of a group can be included in, or deleted from, a group for reasons of convenience or patentability. When any such inclusion or deletion occurs, the specification is herein deemed to contain the group as modified thus fulfilling the written description of all Markush groups used in the appended claims.

[0152] All publications, patents, patent applications, and other references cited in this application are incorporated herein by reference in their entirety for all purposes to the same extent as if each individual publication, patent, patent application, or other reference was specifically and individually indicated to be incorporated by reference in its entirety for all purposes. Citation of a reference herein shall not be construed as an admission that such is prior art to the present disclosure.

[0153] Having described the present disclosure in detail, it will be apparent that modifications, variations, and equivalent embodiments are possible without departing the scope of the present disclosure defined in the appended claims. Furthermore, it should be appreciated that all examples in the present disclosure are provided as non-limiting examples.

### EXAMPLES

[0154] The following non-limiting examples are provided to further illustrate the present disclosure. It should be appreciated by those of skill in the art that the techniques disclosed in the examples that follow represent approaches the inventors have found function well in the practice of the present disclosure, and thus can be considered to constitute examples of modes for its practice. However, those of skill in the art should, in light of the present disclosure, appreciate that many changes can be made in the specific embodiments that are disclosed and still obtain a like or similar result without departing from the spirit and scope of the present disclosure.

### Example 1: KIF26B Silencing Prevents Osseous Transdifferentiation of Progenitor/Stem Cells and Attenuates Ectopic Calcification in a Murine Model

[0155] This Example describes how inhibition of KIF26B attenuates ectopic calcification.

[0156] Abstract

[0157] Ectopic calcification is an osteogenic process that leads to the formation of inappropriate bone within intra-articular soft tissues, often in response to injury or surgery. The molecular mechanisms governing this phenotype have yet to be determined. Using a population genetics approach, described herein is the association of the kinesin superfamily member 26b (Kif26b) with injury-induced ectopic calcification through quantitative trait locus analysis of recombinant inbred mouse strains, consistent with a genome-wide association study that identified KIF26B as a severity locus for ectopic calcification in patients with hip osteoarthritis. Despite these associations of KIF26B with ectopic calcification, its mechanistic role and functional implications have not yet been fully elucidated. Herein is described the functional role of KIF26B in osseous and chondrogenic transdifferentiation of human and murine progenitor/stem cells and in a murine model of non-invasive injury-induced intra-articular ectopic calcification. KIF26B ablation via lentivirus-mediated shRNA significantly arrested osteogenesis of progenitor/stem cells and suppressed the expression of typical osteogenic marker genes. Conversely, KIF26B loss-of-function increased chondrogenesis as demonstrated by enhanced Safranin-O staining and by the elevated expression of chondrogenic marker genes. Furthermore, cell function analysis revealed that KIF26B knockdown significantly decreased cell viability and proliferation and induced cellular apoptosis Mechanistically, loss of osteogenesis was reverted by the addition of a Wnt agonist, SKL2001, demonstrating a role of KIF26B in canonical Wnt/β-catenin signaling. Finally, intraarticular delivery of Kif26b shRNA in B6-129SF2/J mice significantly hampered the development of intra-articular ectopic calcification at 8 weeks after injury compared to mice treated with non-target scrambled shRNA. In summary, these observations highlight that KIF26B plays a crucial role in ectopic bone formation by repressing osteogenesis, but not chondrogenesis, potentially via modulating Wnt/β-catenin signaling. These findings establish KIF26B as a critical determinant of the osteogenic process in pathologic endochondral bone formation and an actionable target for pharmacotherapy to mitigate ectopic calcification (and heterotopic ossification).

[0158] Introduction

[0159] The term ectopic bone—from the Greek word ektopos meaning “away from a place”—is when non-skeletal soft tissues become bone-like (1). Most often, ectopic or acquired calcification results from osteogenesis following direct injury to a tissue (2-4). Ectopic calcification as referred to herein appears as multiple intra-articular nodules in the synovium and joint capsule. It can severely affect the joint and is often recalcitrant to therapy. The incidence of ectopic calcification remains unknown but is not rare. Heterotopic ossification, a form of calcification in soft tissues such as muscles and tendons, has been extensively studied in different contexts and for which the molecular mechanisms have been better understood (5-8). Intra-articular ectopic calcification, however, has not been studied and characterized as well. Although it is thought that the molecular mechanisms that govern physiological calcification of skeletal tissues are akin to those regulating pathological or ectopic calcification of soft tissues (9), clear knowledge gaps still exist when it comes to understanding the etiopathogenesis of ectopic calcification.

[0160] Described herein is a population genetics approach to identifying genes involved in ectopic calcification using an advanced intercross of two informative mouse strains: LG/J (Large), a healer strain with a higher predisposition for developing ectopic calcification, and SM/J (Small), a non-healer strain with a lower susceptibility for developing ectopic calcification (4,10-13). Twenty quantitative trait loci (QTLs) influencing ectopic bone formation subsequent to knee trauma were identified in the advanced intercross line randomly mated for 44 generations (4). The high degree of parental line recombination permitted precise single nucleotide polymorphism mapping to sub-centimorgan intervals containing small sets of candidate genes for the causal genetic factors in synovial ectopic bone formation (4). Within these QTLs, Kif26b was identified as a prime candidate related to ectopic calcification. Furthermore, a genome-wide association study of heterotopic ossification in patients after total hip arthroplasty for osteoarthritis has identified KIF26B as a gene associated with heterotopic ossification severity (14).

[0161] KIF26B is a member of the kinesin superfamily of proteins, which are involved in the microtubule and ATP-dependent transport of various cargos to a specific destination (15). Moreover, studies have shown that Kif26b controls endothelial cell polarity, which is tied to non-canonical Wnt signaling (16) and its expression is increased as cells differentiate into chondrocytes (17). More recently, Kif26b has been tested for a role in osseous transdifferentiation of mouse myoblasts (14). Despite its implication in ectopic calcification in mice and patients, the mechanistic role, and functional implications of KIF26B have not yet been fully elucidated.

[0162] The purpose of the present study is to advance understanding of the role of KIF26B in ectopic calcification by examining the effects of KIF26B knockdown on osteogenic or chondrogenic differentiation of progenitor/stem cells in vitro as well as in an injury-induced ectopic calcification model of anterior cruciate ligament (ACL) rupture in mice. In addition, mechanistic insights are described to understand the role of KIF26B in Wnt signaling and cell processes such as proliferation and apoptosis that highlight the potential of KIF26B as a mechanistic target in the treatment of ectopic calcification and possibly for other forms of pathological bone formation such as heterotopic ossification.

[0163] Materials and Methods

[0164] Ethics Statement

[0165] The utilization of discarded ACL tissues from patients undergoing ACL reconstruction surgery was approved by the Washington University Institutional Review Board (Protocol No. 201104119). All patients provided written and signed informed consent prior to operation. Animal experiments described in this manuscript were approved by the Institutional Animal Care and Use Committee of Washington University (Protocol No. 20190113). An overview of the study design is displayed in FIG. 1A-FIG. 1B.

[0166] Cell Culture

[0167] Progenitor cells were derived from human ACL and termed as ACLp cells (18). ACLp cells were chosen as clinically relevant intra-articular cells that possess characteristics of mesenchymal stromal cells, i.e., they exhibit the potential to become chondrocytes, osteoblasts, and adipocytes after specific cues (19). Briefly, AOL fragments were collected from patients (n=53) undergoing AOL reconstruction surgery (see e.g., TABLE 1) and were transported to the laboratory in sterile sealed containers containing Dulbecco's phosphate-buffered saline (DPBS, Gibco).

TABLE 1
Characteristics of patients from which ACL progenitor cells
were collected and analyzed.

| Patient | Age | | | |
|---|---|---|---|---|
| No. | (year) | Sex | Experiment | Data in |
| P15-063 | 15 | Female | RT-qPCR | FIG. 2C |
| P15-064 | 19 | Male | RT-qPCR | FIG. 2C |
| P15-065 | 16 | Male | RT-qPCR | FIG. 2C |
| P15-066 | 13 | Female | Western blot | FIG. 2D-FIG. 2E |
| P15-067 | 16 | Female | Western blot | FIG. 2D-FIG. 2E |
| P15-068 | 47 | Male | Western blot | FIG. 2D-FIG. 2E |
| P15-031 | 15 | Female | Cell egression | FIG. 12A |
| P15-032 | 34 | Female | Cell egression | FIG. 12A |
| P15-033 | 25 | Male | Cell egression | FIG. 12A |
| P15-070 | 21 | Female | Immunostaining, ARS | FIG. 12B-FIG. |
| | | | | 12C |
| P15-071 | 18 | Male | Immunostaining, ARS | FIG. 12B-FIG. |
| | | | | 12C |
| P15-072 | 19 | Female | Immunostaining, ARS | FIG. 12B-FIG. |
| | | | | 12C |
| P15-069 | 40 | Female | ARS, RT-qPCR | FIG. 12D |
| P15-073 | 19 | Female | ARS, RT-qPCR | FIG. 12D |
| P15-075 | 50 | Male | ARS, RT-qPCR | FIG. 12D |
| P15-077 | 19 | Female | ARS, RT-qPCR | FIG. 12D |
| P15-078 | 44 | Female | ARS, RT-qPCR | FIG. 12D |
| P15-079 | 60 | Female | ARS, RT-qPCR | FIG. 12D |
| P15-080 | 33 | Female | ARS, RT-qPCR | FIG. 3A-FIG. 3D |
| P15-081 | 23 | Male | ARS, RT-qPCR | FIG. 3A-FIG. 3D |
| P15-082 | 17 | Male | ARS, RT-qPCR | FIG. 3A-FIG. 3D |
| P15-083 | 15 | Female | ARS, RT-qPCR | FIG. 3A-FIG. 3D |
| P15-084 | 20 | Male | RT-qPCR | FIG. 3B-FIG. 3D |
| P15-085 | 34 | Male | RT-qPCR | FIG. 3B-FIG. 3D |
| P15-113 | 46 | Male | RT-qPCR | FIG. 5A-FIG. 5E |
| P15-114 | 37 | Male | RT-qPCR, S-O staining | FIG. 5A-FIG. 5G |
| P15-086 | 33 | Female | CCK-8, EdU, RT-qPCR | FIG. 6A-FIG. 6E |
| P16-115 | 27 | Female | RT-qPCR, S-O staining | FIG. 5A-FIG. 5G |
| P15-116 | 39 | Male | RT-qPCR, S-O staining | FIG. 5A-FIG. 5G |
| P15-087 | 36 | Female | CCK-8, EdU, RT-qPCR | FIG. 6A-FIG. 6E |
| P15-088 | 14 | Male | CCK-8, EdU, RT-qPCR | FIG. 6A-FIG. 6E |
| P15-089 | 40 | Male | RT-qPCR | FIG. 6D-FIG. 6E |
| P15-090 | 25 | Male | RT-qPCR | FIG. 6D-FIG. 6E |
| P15-091 | 43 | Male | RT-qPCR | FIG. 6D-FIG. 6E |
| P15-092 | 53 | Female | TUNEL, RT-qPCR | FIG. 7A-FIG. 7E |
| P15-093 | 45 | Male | TUNEL, RT-qPCR | FIG. 7A-FIG. 7E |
| P15-094 | 16 | Male | TUNEL, RT-qPCR | FIG. 7A-FIG. 7E |
| P15-095 | 19 | Female | TUNEL, RT-qPCR | FIG. 7A-FIG. 7E |
| P15-096 | 18 | Female | RT-qPCR | FIG. 7C-FIG. 7E |
| P15-097 | 45 | Male | RT-qPCR | FIG. 7C-FIG. 7E |
| P15-098 | 18 | Female | RT-qPCR | FIG. 8A-FIG. 8B, |
| | | | | FIG. 9A-FIG. 9B |
| P15-099 | 21 | Male | RT-qPCR | FIG. 8A-FIG. 8B, |
| | | | | FIG. 9A-FIG. 9B |
| P15-101 | 55 | Female | RT-qPCR | FIG. 8A-FIG. 8B, |
| | | | | FIG. 9A-FIG. 9B |
| P15-102 | 36 | Female | RT-qPCR, Western blot | FIG. 8A-FIG. 8E |
| P15-103 | 16 | Female | RT-qPCR, Western blot | FIG. 8A-FIG. 8E |
| P15-104 | 22 | Female | RT-qPCR, Western blot | FIG. 8A-FIG. 8E |
| P15-105 | 23 | Female | Western blot | FIG. 8C-FIG. 8E |
| P15-106 | 40 | Female | ARS | FIG. 9C |
| P15-107 | 16 | Female | ARS | FIG. 9C |
| P15-108 | 16 | Female | ARS | FIG. 9C |
| P15-110 | 30 | Female | Western blot | FIG. 9D-FIG. 9F |
| P15-111 | 16 | Male | Western blot | FIG. 9D-FIG. 9F |
| P15-112 | 16 | Female | Western blot | FIG. 9D-FIG. 9F |

ACL = anterior cruciate ligament;
RT-qPCR = real-time polymerase chain reaction;
ARS = Alizarin red staining;
S-O = Safranin-O;
CCK-8 = Cell Counting Kit 8;
EdU = 5-ethynyl-2′-deoxyuridine;
TUNEL = terminal deoxynucleotidyl transferase (TdT)-mediated dUTP nick-end labelling.

[0168] Fragments were washed twice with DPBS, and further diced into 3-4 mm³ pieces. Explants were cultured in 6 well-plates containing Dulbecco's Modified Eagle Medium/Nutrient Mixture F-12 (DMEM/F-12, Gibco) with high glucose (4.5 g/L glucose) and 6 mM L-glutamine and supplemented with 10% fetal bovine serum (FBS, Gibco) and 1% penicillin/streptomycin (100 units/mL and 100 μg/mL respectively, Gibco). Cells were allowed to egress from explants for 3 weeks when explants were removed, and cells were grown in standard culture medium and under ordinary culture conditions. At ˜80% confluence, cultures were washed with 1×PBS to remove non-adherent materials, and then adherent cells were dissociated by exposure to 0.5% trypsin ethylenediaminetetraacetic acid (Thermo Fisher Scientific), living cells were counted using a hemocytometer and trypan blue exclusion dye. In addition, cultures of murine C2C12 (in-house) and C3H10T1/2 cells were established. C2C12 is a mouse-derived myoblast cell line (20), generated as a subclone of the C2 cell line (21)). The C3H10T1/2 cell line (22) has been shown to display fibroblastic morphology in cell culture and is functionally akin to mesenchymal stem cells (23). Both cell types have been shown to undergo osteogenesis upon osteogenic induction (24,25).

[0169] Characterization of ACLp Cells

[0170] In order to characterize ACLp cells, immunofluorescent staining for several stromal cell markers was performed using Human Mesenchymal Stem Cell Characterization Kit (EMD Millipore). This kit contains a panel of positive and negative selection markers for the characterization of the mesenchymal stromal cell population. In brief, 3×10⁵ ACLp cells were directly seeded on the Nunc Lab-Tek Chamber Slides (Thermo Fisher Scientific) and cultured for 3 days. Slides were blocked in 10% normal donkey serum (NDS) in PBS at room temperature for 2 hours. After draining off the blocking buffer, slides were incubated with the primary antibodies for respective cell surface markers at 1:200 dilution using 2% NDS in PBS. Mouse IGg was used as a negative control. Slides were incubated at 4° C. overnight followed by 3 times washes with 1×PBS. Donkey anti-mouse secondary antibody was used (ab150105, Abcam) at 1:200 dilution using 2% NDS in PBS. Phalloidin-iFluor 594 (ab176757, Abcam) was used at 1:500 dilution. Slides were incubated at room temperature for 60 minutes. Finally, the slides were rinsed with PBS before being sealed with VECTASHIELD® antifade mounting medium with 4′,6-diamidino-2-phenylindole (DAPI, Vector Laboratories). Images were taken with Zeiss LSM 880 II Airyscan FAST Confocal Microscope (Zeiss). ACLp cells were also tested for their potential to transdifferentiate into osteoblasts and chondrocytes as described in subsequent sections.

[0171] Lentivirus Construction, Production, and Purification

[0172] The following shRNA sequences were used to target and silence KIF26B mRNA in Homo sapiens 5′-CTTGGCTCTTCAAGCTCATAACTCGAGTTATGAGCTTGAAGAGCCAAGTTTT T-3′ (SEQ ID NO: 1) and 5′-ctgacaacctgctcatcttatctcgagataagatgagcaggttgtcagttttt-3′ (SEQ ID NO: 2) in Mus musculus. Sequences were chemically generated by Thermo Fisher Scientific.

[0173] The shRNA oligonucleotides were annealed and inserted between the Agel and EcoRI (New England BioLabs) sites of the recombinant lentivirus expression plasmid (pLKO-1-TRC, Addgene). Scrambled shRNA that did not target any known mRNA, was used as a negative control (termed scrambled shRNA).

[0174] Accurate insertion of shRNA cassettes was confirmed by restriction mapping and direct DNA sequencing. Recombinant lentiviruses were generated by co-transfecting human embryonic kidney 293T cells (HEK293T, ATCC) with the lentivirus expression plasmid and packaging plasmid. Briefly, 1.5×10⁷ HEK293T cells were seeded in a 15-cm dish and cultured overnight in DMEM medium supplemented with 10% FBS, 2 mM L-glutamine, and 1% penicillin and streptomycin at 37° C. in a cell culture humidified incubator. Lentiviral expression plasmid (10 μg) and package plasmid (pMd2G, 3 μg; psPax2, 9 μg) were pre-mixed in 1 mL Opti-MEM (Gibco) and Lipofectamine 2000 (80 μL, Life Technologies). Following incubation at room temperature for 15 minutes, contents were then added dropwise to HEK293T cells and incubated for another 16 hours. The medium was then replenished with 25 mL of complete growth medium, and cells were incubated at 37° C. for another 48 hours. Next, the culture medium was collected in a syringe and filtered through a 0.45 μm polyethersulfone membrane filter to remove cell debris. Afterward, ⅓ volume of Lenti-X concentrator (Clontech) was added to the medium and incubated for 1 hour at 4° C. The viral supernatant was concentrated by centrifugation at 1,500 g for 45 minutes to obtain a pellet. The supernatant was removed carefully, and the pellet was resuspended in 250 μL of 1×DPBS without Ca⁺⁺ and Mg⁺⁺. The titer of the viral particles was estimated by the Lenti-X™ real-time quantitative polymerase chain reaction (RT-qPCR) Titration Kit (TaKaRa Bio) following the supplier's protocol and then aliquoted and stored at −80° C. until use.

[0175] Lentivirus Transduction

[0176] ACLp cells or C2C12 or C3H10T1/2 cells were seeded in monolayers at a density of 1×10⁵ cells/well in a 12-well plate for 24 hours and then transduced with scrambled shRNA or KIF26B shRNA at a multiplicity of infection (MOI) of 20 using growth medium containing 100 μg/mL protamine sulfate (5 mg/mL protamine sulfate in Opti-MEM medium) for 24 hours. Fresh growth medium containing Puromycin (4 μg/mL, Sigma-Aldrich) was added for 48 hours to select resistant colonies that acquired successful transduction.

[0177] Osteogenic Differentiation Assay

[0178] The osteogenesis was induced by using an osteogenic induction medium StemPro Osteogenesis Differentiation Kit (Gibco) according to the manufacturer's instructions. This medium is composed of StemPro Osteocyte/Chondrocyte Differentiation Basal Medium and StemPro Osteogenesis Supplement and supplemented with 1% penicillin/streptomycin. In brief, ACLp cells transduced with KIF26B shRNA or scrambled shRNA ACLp were seeded at a density of 2×10⁵ cells/well in 12-well plates either in growth medium or in osteogenic induction medium for up to 28 days with fresh medium changed every 3 days to maintain the activity of cells. For osteogenesis of C3H10T1/2 or C2C12 cells, mouse StemXVivo® Osteogenic/Adipogenic Base Media (R&D Systems) and Mouse/Rat StemXVivo® Osteogenic Supplement (R&D Systems) were used according to the manufacturer's protocol. In brief, cells transduced with Kif26b, or scrambled shRNA were seeded in a 12-well plate at a density of 2×10⁵ cells/well with osteogenic differentiation medium for up to 21 days. Fresh medium was changed every other day. The cultured cells were collected at the indicated time points for staining or for RNA and protein extraction.

[0179] Assessment of Osteogenesis by Alizarin Red Staining

[0180] Alizarin red staining was performed to measure mineral deposition at indicated time points days after osteogenic induction (26). ACLp cells or C2C12 or C3H10T1/2 cells were washed twice with 1×PBS and fixed in 4% paraformaldehyde (PFA) solution in PBS for 15 minutes at room temperature. After washing 3 times with deionized H₂O, cells were stained with a 2% Alizarin Red S Staining Kit (pH 4.2, ScienCell™ Research Laboratories) for 30 minutes at room temperature. Then the dye was removed, and cells were washed with deionized H₂O at least 3 times. Cells were visualized under a light microscope and images were captured using optical EVOS XL Core Imaging System (Thermo Fisher Scientific).

[0181] Chondrogenic Differentiation Assay

[0182] To induce chondrogenesis in 3D culture, the pellet culture method was employed. ACLp cells were transduced with scrambled or KIF26B shRNA at an MOI of 20 for 48 hours and then selected with puromycin (5 μg/mL). To prepare pellets, growth medium containing 3×10⁵ cells was dispensed into a 15 mL conical polypropylene tube and spun at 200 g for 5 minutes. The growth medium was replaced by chondrogenic medium: high glucose DMEM (Gibco), 1% penicillin/streptomycin (Sigma-Aldrich), 1% insulin-transferrin-selenium Plus Premix (Corning), 100 nM dexamethasone (Sigma-Aldrich), 10 ng/mL TGF-β3 (R&D Systems), 50 μg/mL L-ascorbic acid 2-phosphate (Sigma-Aldrich), and 40 μg/mL L-proline (Sigma-Aldrich). The tubes with pellets were incubated at 37° C. under hypoxic conditions (2% O2) for up to 28 days with medium replenished every other day. The lids of the tubes were loosened to facilitate air exchange. For histology, the pellets were fixed in 10% neutral buffered formalin solution for 2 hours, followed by dehydration in serial dilutions of ethyl alcohol (30% to 50% to 70%) for 30 minutes each. Same procedures were repeated to obtain the pellets for total RNA extraction. Images were acquired from the pellets at the same scale using a standard ruler.

[0183] Assessment of Chondrogenesis by Safranin-O Staining

[0184] The pellets were embedded in paraffin wax and sections with a thickness of 5 μm were cut from the paraffin block and coated on the glass slide. The sections were deparaffinized with xylazine and ethyl alcohol and hydrated in distilled water. Sections were first stained with Weigert's iron hematoxylin working solution for 10 minutes. After washing in running tap water for 10 minutes, sections were stained with 0.1% aqueous fast green solution for 5 minutes. Sections were rinsed quickly with 1% acetic acid solution for no more than 15 seconds. Next, to visualize glycosaminoglycan, sections were stained with 0.1% aqueous Safranin-O solution for 5 minutes resulting in orange/red staining of negatively charged glycosaminoglycans. Finally, the sections were dehydrated and cleared with 95% ethyl alcohol, absolute ethyl alcohol, and xylene, using 2 changes each, 2 minutes each, cover slipped and imaged using NanoZoomer (Hamamatsu).

[0185] RNA Isolation and RT-qPCR

[0186] Total RNA was extracted from the cells or pellets using RNeasy Mini Kit (Qiagen), according to the manufacturer's instructions (18). The amount and quality of RNA were measured by a Nanodrop spectrophotometer (NanoDrop 2000). The isolated RNA samples were retrotranscribed with a High-Capacity cDNA Reverse Transcription Kit (Thermo Fisher Scientific) to synthesize the first strand of single-stranded cDNA (18). Briefly, a reaction containing 1 μg RNA, reaction buffer, dNTP, random primers, and transcriptase was incubated at 25° C. for 10 minutes, followed by 37° C. for 2 hours, and finally at 85° C. for 5 minutes. The cDNA was stored at −20° C. for future use. To determine the expression of target genes, RT-qPCR was performed using standard methods. 20 μL of reaction mix containing 10 μL of SYBR Green Real-Time PCR Master Mix (Thermo Fisher Scientific), 1 μL cDNA, and 200 nM of gene-specific forward/reverse primer sets. Sequences for the forward/reverse primers are shown in TABLE 2.

TABLE 2
The characteristics of primers used in this study.

| Gene | | Accession | Forward Primer |
|---|---|---|---|
| symbol | Species | No. | Sequence 5′ to 3′ |
| KIF26B | Homo | NM_018012.4 | CGTGTTCTTCACACTGCACA |
| | sapiens | | (SEQ ID NO: 5) |
| ALPL | Homo | NM_000478.5 | GACATCGCCTACCAGCTCAT |
| | sapiens | | (SEQ ID NO: 6) |
| RUNX2 | Homo | NM_001278478.1 | ACAGTAGATGGACCTCGGGA |
| | sapiens | | (SEQ ID NO: 7) |
| BGLAP | Homo | NM_199173.5 | GTAGTGAAGAGACCCAGGCG |
| | sapiens | | (SEQ ID NO: 8) |
| PCNA | Homo | NM_002592.2 | AACCTGCAGAGCATGGACTC |
| | sapiens | | (SEQ ID NO: 9) |
| XRCC2 | Homo | NM_005431.2 | CCTTGCCCGACTTGAAGGTA |
| | sapiens | | (SEQ ID NO: 10) |
| BAX | Homo | NM_001291428.2 | CTGACGGCAACTTCAACTGG |
| | sapiens | | (SEQ ID NO: 11) |
| BCL2 | Homo | NM_000633.2 | GGGAGGATTGTGGCCTTCTT |
| | sapiens | | (SEQ ID NO: 12) |
| WNT16 | Homo | NM_057168.1 | CTTTGGCTACGAGCTGAGCA |
| | sapiens | | (SEQ ID NO: 13) |
| AXIN2 | Homo | NM_004655.4 | TGATGCGCTGACGGATGATT |
| | sapiens | | (SEQ ID NO: 14) |
| SOX9 | Homo | NM_000346.4 | CGAGCCCGATCTGAAGAAGG |
| | sapiens | | (SEQ ID NO: 15) |
| COL2A1 | Homo | NM_001844.4 | CCCAGAGGTGACAAAGGAGA |
| | sapiens | | (SEQ ID NO: 16) |
| ACAN | Homo | NM_001135.4 | GGCACTAGTCAACCCTTTGG |
| | sapiens | | (SEQ ID NO: 17) |
| PPIA | Homo | NM_021130.4 | CTGCACTGCCAAGACTGAG |
| | sapiens | | (SEQ ID NO: 18) |
| Kif26b | Mus | NM_001161665.1 | ctcaactcggtggccattca |
| | musculus | | (SEQ ID NO: 19) |
| Runx2 | Mus | NM_001146038.2 | ccacctctgacttctgcc |
| | musculus | | tc(SEQ ID NO: 20) |
| Bglap2 | Mus | NM_001032298.3 | gtccaagcaggagggcaata |
| | musculus | | (SEQ ID NO: 21) |
| Alpl | Mus | NM_007431.3 | ctgactgacccttcgctctc |
| | musculus | | (SEQ ID NO: 22) |
| Axin2 | Mus | NM_015732.4 | gaccgacgattccatgt |
| | musculus | | cca(SEQ ID NO: 23) |
| Gapdh | Mus | NM_001289726.1 | aggtcggtgtgaacggatt |
| | musculus | | tg(SEQ ID NO: 24) |
| Gene | | Amplicon size | Reverse Primer |
| symbol | Location | (bp) | Sequence 5’ to 3’ |
| KIF26B | 2480-2591 | 102 | TTTCACACAGCTGCCGAGAT |
| | | | (SEQ ID NO: 25) |
| ALPL | 871-993 | 123 | CCTGGCTTTCTCGTCACTCT |
| | | | (SEQ ID NO: 26) |
| RUNX2 | 868-974 | 107 | GGATGAGGAATGCGCCCTAA |
| | | | (SEQ ID NO: 27) |
| BGLAP | 403-524 | 122 | TCAGCCAACTCGTCACAGTC |
| | | | (SEQ ID NO: 28) |
| PCNA | 345-463 | 119 | ATACTGGTGAGGTTCACGCC |
| | | | (SEQ ID NO: 29) |
| XRCC2 | 104-221 | 118 | TCCTGTTCCTTCTGGGCCAT |
| | | | (SEQ ID NO: 30) |
| BAX | 356-480 | 125 | GTCCAATGTCCAGCCCATGA |
| | | | (SEQ ID NO: 31) |
| BCL2 | 926-1023 | 98 | ATCCACAGGGCGATGTTGTC |
| | | | (SEQ ID NO: 32) |
| WNT16 | 581-694 | 114 | TCTGTCATGTTGCCTGCACT |
| | | | (SEQ ID NO: 33) |
| AXIN2 | 1227-1347 | 121 | ATTGGCCTTCACACTGCGAT |
| | | | (SEQ ID NO: 34) |
| SOX9 | 540-630 | 91 | CCAGTCGTAGCCTTTGAGCA |
| | | | (SEQ ID NO: 35) |
| COL2A1 | 3521-3619 | 117 | CACCTTGGTCTCCAGAAGGA |
| | | | (SEQ ID NO: 36) |
| ACAN | 5704-5779 | 95 | CTGAACCCTGGTAACCCTGA |
| | | | (SEQ ID NO: 37) |
| PPIA | 430-546 | 117 | TGGTCTTGCCATTCCTGGAC |
| | | | (SEQ ID NO: 38) |
| Kif26b | 1348-1461 | 114 | ggtctctgtcatcagct |
| | | | ggg(SEQ ID NO: 39) |
| Runx2 | 1292-1386 | 95 | gaactgcctggggtctg |
| | | | aaa(SEQ ID NO: 40) |
| Bglap2 | 156-263 | 108 | ttaagctcacactgctc |
| | | | ccg(SEQ ID NO: 41) |
| Alpl | 1153-1255 | 103 | ggtcaatcctgcctcct |
| | | | tcc(SEQ ID NO: 42) |
| Axin2 | 1270-1381 | 112 | attggccttcacactgc |
| | | | gat(SEQ ID NO: 43) |
| Gapdh | 100-222 | 123 | tgtagaccatgtagttg |
| | | | aggtca(SEQ ID |
| | | | NO: 44) |

bp = base pair

[0187] RT-qPCR was performed on a 7500 Fast Real-time PCR System (Applied Biosystems). The relative expression levels of target genes were normalized to the amount of PPIA expressed. The relative mRNA expression between groups was calculated using the 2-ΔΔCt method.

[0188] Western Blot Analysis

[0189] Total cell lysates for the protein analysis were prepared by radioimmunoprecipitation assay buffer (Abcam) containing 50 mM Tris-HCl (pH 8.0), 150 mM NaCl, 1% Triton-X-100, 0.1% SDS, 0.5% sodium deoxycholate, and supplemented with 1× complete protease inhibitor cocktail (Millipore Sigma). Total protein concentration was analyzed using Bradford Protein Assay (Bio-Rad). Protein was fractioned in a precast polyacrylamide gel and transferred to polyvinylidene fluoride or polyvinylidene difluoride membrane. Odyssey Blocking buffer (LI-COR Biosciences) containing 0.1% Tween 20 was used to block the protein-containing membranes for 1 hour at room temperature. The membranes were probed with a specific primary antibody diluted with Odyssey Blocking buffer overnight at 4° C. The following primary antibodies were used: anti-active β-catenin (8814; Cell Signaling Technology); anti-total-β-catenin (ab16051, Abcam), anti-KIF26B (17422-1-AP, Proteintech) at a 1:1000 dilution and R-actin (A2228; Sigma-Aldrich) at 1:4000 dilution. Secondary antibodies from LI-COR (IRDye® 8000W-labeled anti-rabbit; IRDye® 680RD-labeled anti-mouse) were applied at 1:20000 dilution for 50 minutes at room temperature. Membranes were scanned by LI-COR Odyssey Imager (LI-COR Biosciences) at medium resolution using LI-COR software (RRID: SCR_014579).

[0190] Detection of Cell Proliferation by CCK-8 Assay

[0191] The numbers of living ACLp cells were measured in a proliferation assay using a Cell Counting Kit 8 (CCK-8, Sigma-Aldrich) according to the supplier's protocol. Briefly, ACLp cells were plated in a 96-well plate at a density of 1×10³ cells/well. After transduction with scrambled shRNA or KIF26B shRNA for 24 hours, the cells were cultured for indicated time points (0, 3, 5, and 7 days). In the CCK-8 assay, 100 μL of growth medium with 10 μL of CCK-8 solution was added to each well and the plate was incubated at 37° C. for 2 hours. Finally, the absorbance of each well was measured at 450 nm wavelength using BioTek Cytation 5 (BioTek Instruments).

[0192] 5-ethynyl-2′-deoxyuridine (EdU) Incorporation Assay

[0193] The proliferation of ACLp was evaluated by using Click-iT™ EdU Imaging Kit (Invitrogen) according to the supplier's protocol. Briefly, cells were seeded in a 24-well plate at a density of 1×10⁴ cells/well and transduced with scrambled shRNA or KIF26B shRNA. Following culture for 48 hours, cells were exposed to 10 μM EdU reagent for 2 hours then fixed with 4% PFA, permeabilized with 0.5% Triton X-100, and stained with Click-IT reaction cocktail. The cell nuclei were marked with Hoechst 33342 (Invitrogen) at a concentration of 5 μg/mL for 30 minutes. The ratio of EdU positive cells to total cells was calculated under a high magnification field using an Axio Observer Fluorescence microscope (Zeiss).

[0194] Terminal Deoxynucleotidyl Transferase-Mediated dUTP Nick End Labeling (TUNEL) Assay

[0195] ACLp cells apoptosis was measured by TUNEL assay using In Situ Cell Death Detection Kit, Fluorescein (Roche) according to the manufacturer's protocol. Briefly, 5×10⁴ cells were seeded in a 24-well culture plate and transduced with either KIF26B shRNA or scrambled shRNA for 3 days. Cells were then washed 3 times with 1×PBS and fixed with 4% PFA and permeabilized with 0.1% Triton X-100. The TUNEL reaction mixture was prepared with label solution and enzyme solution at a ratio of 1:9. The cells were incubated with the TUNEL reaction mixture at 37° C. for 1 hour, followed by Hoechst 33342 staining to identify the nuclei. The samples were visualized with an Axio Observer fluorescence microscope (Zeiss). The percentage of TUNEL-positive cells in 4 microscopic fields was calculated for quantification purposes using this formula: number of dead cells/total number of cells×100.

[0196] Treatment of ACLp Cells with Wnt Agonist

[0197] To demonstrate whether the Wnt/β-catenin pathway improves osteogenic differentiation of ACLp cells that was inhibited by KIF26B knockdown, ACLp cells were treated with the Wnt signaling agonist II SKL2001 (EMD Millipore), a small molecule activator of Wnt/β-catenin pathway (27). In short, 5×10⁵ ACLp cells were first treated with KIF26B shRNA or scrambled shRNA for 48 hours and selected by Puromycin for another 48 hours. Afterward, 2×10⁵ ACLp cells were seeded in a 12-well plate. Next osteogenesis was induced as above but in addition, SKL2001 (10 μM) dissolved in dimethyl sulfoxide (DMSO, Sigma-Aldrich) or DMSO only (vehicle) was added to cells. The medium was changed 3 times a week. After 7 days of osteogenic induction, the protein levels of active and total β-catenin were detected by Western blot as described above. After culture for 28 days, the Alizarin red staining was performed as above. After 28 days of osteogenic induction, RNA was isolated and expression of AXIN2 and WNT16 was measured using standard methods detailed above.

[0198] Murine Model of Intra-Articular Ectopic Calcification

[0199] B6-129SF2/J mice were purchased from The Jackson Laboratory (Stock No. 101045/J). Mice were kept at the institution's animal facility with a constant humidity of 30-70%, temperature of 2110° C., light/dark cycle of 12 hours, and high standards of animal husbandry. Experiments were performed on 10-week-old male mice under general anesthesia (2.5% isoflurane in 4 L/minute oxygen). Animals received an intra-articular injection 24 hours before loading and then once fortnightly for up to 8 weeks using a previously described method (28). Mice either received 10 μL lentivirus Kif26b shRNA (treatment group, n=8) or the same volume of lentivirus scrambled shRNA (control group, n=7). Ectopic calcification was instigated in the knee using a non-invasive ACL rupture model (2,29). Briefly, axial compression was applied through the foot joint via the upper loading cup of a material testing machine (Instron ElectroPuls E1000), while the lower cup held the knee in a fixed position and connected to the load cell. The cyclic load was applied for 0.34 seconds, with a rise and fall time each of 0.17 seconds and a baseline hold time of 10 seconds between each cycle. The highest loading force used was 12 Newtons with a 0.5 Newtons preload force to maintain the limb in a fixed position between periods of peak loading. This loading pattern was repeated 60 times in a single loading session. The contralateral left limb served as a control. After recovery from anesthesia, mice resumed prior cage activity with ad libitum food and water intake. At 8 weeks post-injury, mice were sacrificed in a carbon dioxide chamber. Knee joints were separated from the body and skin and soft tissues were removed. Joints were fixed in 10% neutral buffered saline for 48 h. Following washing with 1×PBS, samples were infiltrated in 30% sucrose and kept at 4° C. for a week for micro-computed tomography (μCT) scanning.

[0200] μCT Analysis

[0201] Two mice in each group were scanned by in vivo μCT using a vivaCT-40 μCT scanner (Scanco-Medical) 4 weeks after loading to examine the development of ectopic calcification. Increased mortality was noted following in vivo μCT imaging, therefore, analysis of ectopic nodules was restricted to ex vivo imaging only and examples of in vivo imaging were used as illustrative information. Ex vivo μCT of all mice was used to detect ectopic calcification in mouse knee at 8 weeks after loading. Ossified nodules were visualized by constructing 3-dimensional images in Dragonfly imaging software (Object Research Systems), and were quantified by calculating all mineralized areas in and around the joint space excluding the patella, anterior horns of the menisci, and fabella. All analyses were carried out in a blinded fashion. To determine any off-target effects of Kif26b knockdown on pre-existing bone, a number of trabecular and subchondral bone parameters were measured. The following μCT settings were used as described previously (2): energy=45 kV, voxel size=21 μm, intensity=177 μA and integration time=300 ms. The following morphometric parameters of the tibial cancellous bone were calculated for trabecular epiphyseal compartments: trabecular bone volume fraction (BV/TV), trabecular thickness (Tb.Th), trabecular separation (Tb.Sp), volumetric bone mineral density (vBMD) and tissue mineral density (TMD). Subchondral bone thickness was measured using a custom-written MATLAB 2015b program (MathWorks).

[0202] Histology and Confocal Microscopy

[0203] Undecalcified hind limbs were fresh frozen and sectioned at 5 μm thickness using a cryostat, and stained with Safranin-O as described above. The sections were imaged using a NanoZoomer digital slide scanner (Hamamatsu).

[0204] To confirm the knockdown of Kif26b in vivo, immunofluorescent staining was performed. For immunofluorescence, sections were washed with 1×PBS three times. Antigen retrieval was accomplished with 10 μg/mL proteinase K (EMD Millipore) in 10 mM Tris-HCl (pH 7.4-8.0) for 20 minutes at 37° C. Non-specific binding was then blocked with 10% goat serum for 1 hour at room temperature. Slides were incubated with rabbit anti-Kif26b (1:50, 17422-1-AP, Proteintech) and rat anti-type II collagen (in-house, 1:200) in 2% goat serum overnight at 4° C. in a humidified chamber. Antigens were detected by Alexa Fluor® 488 conjugated goat anti-rabbit polyclonal antibody (1:200, ab150077, Abcam) and Alexa Fluor® 594 conjugated goat anti-rabbit polyclonal antibody (1:200, ab150080, Abcam) for 1 hour at room temperature. After another wash, slides were counterstained with Fluoro-Gel II with DAPI. Images were taken with Confocal Laser Scanning Microscope (Leica).

[0205] Statistical Analyses

[0206] Each experiment was performed at least three times in independent patient samples and each assay included a minimum of three technical replicates. Images are shown from representative experiments and numeric data are expressed as mean±standard deviation from all experiments to display the variability across different experiments. Descriptive statistics were used to report group means and standard deviations for numerical data reported in the text. Quantitative data are shown in the form of box plots with minimum and maximum values and each individual data point unless displayed otherwise. Data were analyzed with the use of GraphPad PRISM ver. 9 (GraphPad Software). A two-tailed Unpaired t-test or Mann-Whitney test was used for comparison between the two groups. Kruskal-Wallis test with Dunn's multiple comparison test was used for comparison between more than two groups. For normally distributed data, a 1-way analysis of variance with Tukey's post hoc test was used. Two-way analysis of variance test was used for human cell proliferation assay, some chondrogenic expression data, and for mouse trabecular and subchondral bone parameters using Šidák's multiple comparison test when the interaction was significant. The criterion of statistical significance was set at a p<0.05 for all analyses.

[0207] Results

[0208] Lentivirus-shRNA Successfully Knocks Down KIF26B mRNA and Protein

[0209] KIF26B expression in human ACLp cells and murine C3H10T1/2 and C2C12 cells was ablated via lentivirus-mediated shRNA targeting KIF26B (see e.g., FIG. 2A-FIG. 2B). KIF26B mRNA expression as measured by RT-qPCR was effectively inhibited to about 80% after KIF26B shRNA transduction compared to scrambled shRNA transduction (0.21±0.03 vs.1.01±0.14; p<0.001) (see e.g., FIG. 2C). The data from RT-qPCR paralleled Western blot findings. KIF26B protein production as detected by Western blot analysis was also decreased significantly by KIF26B shRNA compared to scrambled shRNA (0.24±0.10 vs. 1.00±0.00; p<0.001) (see e.g., FIG. 2D-FIG. 2E). Similar to human ACLp cells, the expression of Kif26b was also knocked down in murine C3H10T1/2 and C2C12 cells. RT-qPCR analysis showed decreased Kif26b mRNA in C3H10T1/2 cells transduced with Kif26b shRNA compared to those transduced with scrambled shRNA (0.55±0.03 vs. 1.02±0.22; p=0.005) (see e.g., FIG. 2F). In C2C12 cells, the expression of Kif26b mRNA was lower in cells transduced with Kif26b shRNA than cells transduced with scrambled shRNA (0.37±0.07 vs. 1.02±0.06; p<0.001) (see e.g., FIG. 2G). These observations indicate that KIF26B shRNA transduction successfully suppressed the expression of KIF26B both at mRNA and protein levels in vitro.

[0210] ACLp Cells Express Stromal Cell Markers and Undergo Osteoblastic Differentiation In Vitro

[0211] The cells that migrate out of human ACL tissues constitute a rich population of progenitor cells that exhibit stromal cell-like properties and have the ability to transdifferentiate into chondrocytes, osteoblasts, and fat cells (19). Cells began to migrate out of the tissues within a few days, and over a period of 3 weeks the culture plates became confluent (see e.g., FIG. 12A). Prior to testing the effect of KIF26B knockdown on ACLp cells transdifferentiation, these cells were tested for stromal cell markers and osteogenic differentiation potential. Immunostaining revealed that ACLp cells showed positive staining for CD44, CD90, CD146, and Stro-1, but negative for CD14 and CD19 (see e.g., FIG. 12B). Next, ACLp cells differentiated into osteoblasts when induced by osteogenic medium over a period of 28 days (see e.g., FIG. 12C). ACLp cells after osteogenic induction also displayed a significant increase in the osteogenic marker, ALPL compared with the cells in growth medium (13.04±6.33 vs. 1.08±0.52; p=0.001) (see e.g., FIG. 12D).

[0212] KIF26B Knockdown Attenuates Osteogenesis

[0213] To determine whether KIF26B knockdown significantly decreases osteogenic differentiation of ACLp cells, ACLp cells were transduced with KIF26B shRNA or scrambled shRNA in osteogenic medium for 28 days. Culture with osteogenic induction media significantly increased osteogenesis in control and scrambled shRNA groups compared with ACLp cells cultured in growth medium (data not shown). KIF26B knockdown significantly arrested osseous transdifferentiation of ACLp cells compared to scrambled shRNA (see e.g., FIG. 3A). To further confirm these findings, the expression of typical osteogenic markers was measured, showing that the expression of RUNX2 (0.42±0.01 vs. 1.00±0.01; p<0.001), ALPL (0.68±0.02 vs. 1.06±0.06; p<0.001), and BGLAP (0.56±0.04 vs. 0.88±0.11; p<0.001) was decreased in ACLp cells receiving KIF26B shRNA compared with those receiving scrambled shRNA (see e.g., FIG. 3B-FIG. 3D). These findings suggests that KIF26B is required for osteogenic transdifferentiation of ACLp cells since its ablation significantly arrests this process.

[0214] The functional role of Kif26b was also tested in two murine cell types: C3H10T1/2 cells and C2C12 cells. Kif26b knockdown significantly suppressed osteogenesis of C3H10T1/2 cells compared to scrambled shRNA (see e.g., FIG. 4A). Likewise, knockdown of Kif26b significantly arrested osseous transdifferentiation of C2C12 cells as evidenced by loss of Alizarin red staining (see e.g., FIG. 4B). This observation was further supported by decreased expression of osteogenic-specific marker genes Runx2 (0.71±0.04 vs. 0.92±0.07; p=0.010) (see e.g., FIG. 4C), Alpl (0.64±0.02 vs. 0.99±0.10; p=0.004) (see e.g., FIG. 4D), Bglap (0.85±0.03 vs. 0.96±0.03; p=0.011) (see e.g., FIG. 4E), as well as the expression of Axin2 (0.64±0.04 vs. 0.95±0.03; p<0.001) (see e.g., FIG. 4F), a downstream target of Wnt/β-catenin signaling.

[0215] KIF26B Loss-of-Function Promotes Chondrogenesis

[0216] To determine whether KIF26B knockdown affects the chondrogenic differentiation of ACLp cells, ACLp cells were transduced with KIF26B shRNA or scrambled shRNA in chondrogenic medium for 28 days. The expression of KIF26B mRNA was still significantly less in pellets prepared from cells transduced with KIF26B shRNA (n=4) than scrambled shRNA (n=3) (0.62±0.13 vs. 1.01±0.13; p=0.011) after 28 days of chondrogenesis, indicating that KIF26B expression was successfully suppressed during the chondrogenesis (see e.g., FIG. 5A). The expression of typical chondrogenic-specific marker genes was then measured, showing a significant treatment (KIF26B shRNA, scrambled shRNA) by condition (growth medium, chondrogenic medium) interaction for SOX9 (P<0.001) (see e.g., FIG. 5B), COL2A1 (p=0.018) (see e.g., FIG. 5C), and ACAN (p<0.001) (see e.g., FIG. 5D), with increased expression of these markers in ACLp cells transduced with KIF26B shRNA compared with those transduced with scrambled shRNA. The expression of AXIN2 (0.46±0.05 vs. 1.00±0.96; p<0.001) was decreased in cells transduced with KIF26B shRNA than scrambled shRNA (see e.g., FIG. 5E). The pellet size was slightly smaller in KIF26B shRNA group than scrambled shRNA group (see e.g., FIG. 5F). Cartilage matrix deposition was measured by histological examination of glycosaminoglycan by Safranin-O staining. The intensity of Safranin-O staining was very high (indicative of rich proteoglycan contents) in pellets in the KIF26B shRNA group in contrast to the scrambled shRNA group where the intensity was notably low (see e.g., FIG. 5G). More homogeneous chondrocytes, as demonstrated by Safranin-O staining, were observed in the KIF26B shRNA group than in the scrambled shRNA group. Together, these findings highlight a positive role of KIF26B knockdown on chondrogenic transdifferentiation of ACLp cells.

[0217] Loss of KIF26B Attenuates Cell Proliferation

[0218] To elucidate the effects of KIF26B knockdown on cell proliferation, the number of living ACLp cells was examined in the KIF26B shRNA group. Using CCK-8 assay, cells treated with KIF26B shRNA were shown to exhibit significantly fewer numbers at day 3, day 5, and day 7 time points compared to both cells treated with scrambled shRNA and non-treated control cells (see e.g., FIG. 6A). At day 1, no significant differences were observed in cell number across groups. At day 3, cell number was significantly lower in the KIF26B shRNA group compared to both control (p=0.007) and scrambled shRNA (p=0.033) groups. Similarly, at day 5 and 7, cell number was significantly lower in KIF26B shRNA transduced cells compared to untreated control (p<0.001; p<0.001) and cells transduced with scrambled shRNA (p=0.002; p=0.001).

[0219] EdU staining was then performed to gauge the effects of KIF26B knockdown on cell proliferation. Results showed that the number of EdU positive cells was less in the KIF26B shRNA transduced group than in the scrambled shRNA and control groups (see e.g., FIG. 6B). The number of EdU positive cells was also significantly different across groups (1-way ANOVA p=0.012, F=10.27). Specifically, there were significantly lower EdU positive cells in the KIF26B shRNA (8.00±2.65) group compared to the control (19.33±4.93; p=0.047) and scrambled shRNA (24.00±5.29; p=0.011) groups (see e.g., FIG. 6C). Finally, mRNA expression of various cell proliferation markers such as PCNA (Kruskal-Wallis p<0.001) and XRCC2 (Kruskal-Wallis p<0.001) was significantly lower in cells treated with KIF26B shRNA as shown in FIG. 6D. Specifically, the expression of PCNA was significantly lower in the KIF26B shRNA (0.67±0.15) group compared to control (1.00±0.00; p=0.010) and scrambled shRNA (0.96±0.10; p=0.014) groups. Similarly, the expression of XRCC2 was significantly lower in the KIF26B shRNA (0.63±0.08) group compared to control (1.00±0.00; p=0.003) and scrambled shRNA (1.02±0.08; p=0.025) groups.

[0220] Loss of KIF26B Induces Cellular Apoptosis

[0221] Recognizing that KIF26B loss-of-function attenuates cell proliferation, the KIF26B knockdown effect on cellular apoptosis was tested. Cells treated with KIF26B shRNA showed an increased number of TUNEL positive cells (see e.g., FIG. 7A). Quantification further showed that the fraction of TUNEL positive cells was significantly higher in the KIF26B shRNA group compared to the scrambled shRNA group (4.65±0.62 vs. 0.79±0.32; p<0.001) (see e.g., FIG. 7B). In addition, the expression of genes related to cellular apoptosis was also measured. The expression of pro-apoptotic BAX mRNA was significantly increased in cells treated with KIF26B shRNA compared with cells treated with scrambled shRNA (3.31±0.35 vs. 0.97+0.08; p<0.001) (see e.g., FIG. 7C). At the same time, the expression of the anti-apoptotic gene, BCL2, was significantly decreased in cells treated with KIF26B shRNA compared with scrambled shRNA (0.46±0.01 vs. 1.02±0.05; p<0.001) (see e.g., FIG. 7D). The net ratio of BAX and BCL2 (BAX/BCL2), which is an indicator of apoptosis, was significantly increased in cells treated with KIF26B shRNA compared to those treated with scrambled shRNA (7.29±0.80 vs. 0.95±0.08; p<0.001) (see e.g., FIG. 7E).

[0222] KIF26B Modulates Wnt/B-Catenin Signaling

[0223] Whether KIF26B knockdown influences canonical Wnt/β-catenin signaling was tested next. knockdown of KIF26B suppressed the expression of Wnt/β-catenin pathway as demonstrated by the decrease in mRNA expression of WNT16 (0.70±0.02 vs. 1.00±0.11; p<0.001) (see e.g., FIG. 8A) and AXIN2 (0.97±0.03 vs. 0.63±0.04; p<0.001) (see e.g., FIG. 8B), mRNA compared to scrambled shRNA. These findings are supported by a decrease in the protein level of active β-catenin (0.47±0.13 vs. 1.00±0.00; p<0.001) and total β-catenin (0.55±0.21 vs. 1.00±0.00; p=0.005) in KIF26B shRNA cells compared to scrambled shRNA transduced cells (see e.g., FIG. 8C-FIG. 8E). Together, these data suggest that KIF26B modulates the expression of canonical Wnt/β-catenin signaling.

[0224] Next, Wnt agonist II, SKL2001, was used to test whether it rescues the lost phenotype. Compared with vehicle (DMSO), the expression of Wnt/β-catenin signaling genes, namely WNT16 (3.06±0.13 vs. 1.00±0.14; p<0.001) (see e.g., FIG. 9A) and AXIN2 (2.20±0.08 vs. 1.00±0.02; p<0.001) (see e.g., FIG. 9B), was increased in SKL2001 treated cells. These findings further demonstrate that decrease in osteogenesis due to KIF26B loss-of-function was reverted by the addition of Wnt agonist II (see e.g., FIG. 9C). Consistently, the protein levels of active β-catenin were decreased after KIF26B knockdown, which was significantly attenuated by SKL2001 treatment (see e.g., FIG. 9D). Quantification of Western blot signal intensity was in parallel to these observations both for active β-catenin (1-way ANOVA p<0.001, F=20.75) (see e.g., FIG. 9E) and total β-catenin (1-way ANOVA p<0.001, F=53.18) (see e.g., FIG. 9F).

[0225] Based on these observations, the working model displayed in FIG. 10 shows that KIF26B inhibition decreases total β-catenin and active β-catenin levels and results in suppression of osteogenesis of ACLp cells coupled with the inhibition of typical osteogenic-specific marker genes. Moreover, KIF26B silencing promotes the chondrogenic differentiation of ACLp cells and stimulates the expression of chondrogenic-specific markers.

[0226] Kif26b shRNA Treatment Suppresses Kif26b Expression and Mitigates Ectopic Calcification in Mice

[0227] Whereas increased Kif26b staining was noted in knees treated with scrambled shRNA, the staining intensity of Kif26b in the Kif26b shRNA treatment group was minimal indicating that Kif26b shRNA administration effectively suppressed the expression of Kif26b protein in vivo (see e.g., FIG. 11A). Since KIF26B knockdown promoted chondrogenesis in vitro, proteoglycan was measured in ectopic calcified nodules. There was an increased Safranin O staining intensity in the Kif26b shRNA group compared with the scrambled shRNA group indicating increased chondrogenesis (see e.g., FIG. 11A). In order to investigate the role of Kif26b in ectopic calcification, an injury-induced ectopic calcification model was applied in mice. Intra-articular delivery of Kif26b shRNA did not reduce the number of calcified nodules at 4 weeks after injury as determined by in vivo μCT analysis (see e.g., FIG. 13). However, at 8 weeks, fewer nodules were observed in Kif26b knockdown group (see e.g., FIG. 11B). Quantification of nodules showed that the number of nodules significantly decreased in mice receiving Kif26b shRNA compared with scrambled shRNA (4.00±0.71 vs. 7.25±0.96, p<0.001) (see e.g., FIG. 11C).

[0228] Kif26b shRNA does not Affect Pre-Existing Trabecular and Subchondral Bone

[0229] The effect of Kif26b knockdown on already formed bone cancellous bone was measured in the proximal tibia. Kif26b knockdown did not significantly affect trabecular bone parameters namely BV/TV (p=0.883), Tb.Th (p=0.167), Tb.Sp (p=0.795), vBMD (p=0.855), and TMD (p=0.836), nor did it affect subchondral bone plate thickness (p=0.645) (see e.g., FIG. 14A-FIG. 14F).

[0230] Discussion

[0231] These findings establish KIF26B as a critical participant in the osteogenic process and a viable pharmacotherapy target for the treatment of pathologic ectopic calcification. These results suggest that KIF26B plays a role in ectopic calcification which is a target for biologic treatments to treat and potentially prevent the development of ectopic calcification. These findings are clinically significant as there are currently no biological treatment options available to prevent or treat the development of ectopic calcification. Although surgical excision of ossified nodules from the joint is indicated in severe cases where calcified nodules impede joint movement (30), the recurrence rate is very high (31). Unlike osteophytes, which are attached to the bone surface, ectopic calcified nodules are embedded in the joint capsule and/or in the synovium. In addition, while these nodules are relatively benign when embedded in soft issues (e.g., synovium or joint capsule), they can become loose in the joint and put patients at risk for mechanical symptoms and damage to the articular cartilage. KIF26B was identified from a previous large-scale genetic screening of several advanced intercross mouse lines for the development of trauma-induced ectopic calcification, in which Kif26b was identified as a prime candidate gene implicated in ectopic calcification (4). A recent genome-wide association study in human cases of hip ossification identified KIF26B as a severity locus for pathological bone formation (14), independently verifying this finding in mice. These studies establish KIF26B on the leading edge of research into intra-articular ectopic calcification.

[0232] A recent study (14) showed that KIF26B is expressed in bone and that modulation of KIF26B in an in vitro model of murine myoblast osteogenesis is able to inhibit osseous transdifferentiation of C2C12 cells. This effect is mechanistically driven through ERK1/2 signaling. A novel finding of this study is that KIF26B affects the canonical Wnt/β-catenin signaling pathway. Previously, it has been reported that KIF26B functions via non-canonical Wnt5a-Ror signaling to control morphogenetic cell and tissue behavior (16). Kif26b has also been shown to switch the canonical β-catenin-dependent pathway toward the non-canonical PCP pathway (32). After Wnt3a stimulation, Kif26b depletion induces an increase in the ratio between active and total β-catenin, which suggests activation of the canonical Wnt signaling pathway. Cartilage repair has been demonstrated to require a switch in the Wnt pathway mediated by Wnt16 (33); this redirects the cell from the canonical pathway to the non-canonical pathway, where a repair pathway characterized by lubricin is synthesized in place of the canonical AXIN2. Although cartilage and bone do not appear on any tissue blots, one study showing enhancer-trap LacZ transgene of Kif26b during development demonstrated strong expression in the somites, limb buds, and face in the embryo (34). In addition, studies of stem cell differentiation showed increases in Kif26b as cells differentiate into chondrocytes (17).

[0233] KIF26B also modulated two particularly important cellular processes: cell proliferation and apoptosis. Cells treated with KIF26B shRNA showed impaired viability and proliferation capability compared to control cells. As cell proliferation is associated with increased ossification (35), the observation that KIF26B knockdown suppresses cell proliferation and ectopic calcification explains the role of KIF26B in modulating ectopic calcification by altering cell function. The osteogenic medium would significantly promote the proliferation of ACLp cells transduced with KIF26B shRNA, which is different from the effects of KIF26B knockdown on ACLp cells in the context of growth medium. Compared to growth medium, the ingredients in osteogenic medium facilitate cell proliferation and then induce osteogenic differentiation. That may be the reason that massive cell apoptosis was not observed after KIF26B silencing in ACLp cells during osteogenesis. While there is no direct link known between ectopic calcification and apoptosis, some studies have shown that factors that induce heterotopic ossification such as hypoxia and HIF1α (7) regulate apoptosis (35,36).

[0234] In this study, ligament-derived progenitor cells were used in contrast to more commonly used mesenchymal progenitor cells, although it was confirmed that KIF26B loss-of-function equally impedes osteogenesis in other cell types such as murine C2C12 and C3H10T1/2 cells. Since ACLp cells express stem cell markers as defined by the International Society of Cellular Therapy and adhere to plastic (37), these cells have translational value for this clinical problem. This approach offers some advantages from clinical and translational perspectives. While heterotopic ossification in tendons and ligaments is not uncommon (38), frequently occurring in inflamed and injured ligaments/tendons which results in disability and pain, its pathogenesis is poorly understood. Calcification in tendons and ligaments follows the same endochondral ossification path that is followed by embryonic bone development and ossification of the knee (39,40). However, this study does not imply that ACLp cells are the sole source of cells that contribute to ectopic calcification in the joint. Several other cell types have been implicated in ectopic bone formation such as immune and stromal cells and CD146+ pericytes (41,42). It has previously been shown that cells responding to ACL tears in mice originate from the synovium, subchondral bone marrow, and Groove of Ranvier (29). Intra-articular injection of KIF26B shRNA targets all cells within the synovial joint so the therapeutic effect observed in this study is not specific to ACLp cells.

[0235] While this study demonstrates that Kif26b knockdown suppresses the development of intra-articular ectopic calcification after mechanical trauma and provides some mechanistic insights, many questions remain. For instance, shown herein is that the Wnt/β-catenin pathway is involved downstream of KIF26B, whereas other studies (14) have shown crosstalk between ERK signaling and KIF26B. A number of other studies have shown the involvement of other critical genes and pathways in heterotopic ossification, such as HIF-1α (7), TGF-β (40), and BMP-2 (43). Further research may investigate whether these pathways are linked to KIF26B signaling. Thus, it is clear while several genes and pathways participate in this phenotype, ectopic calcification occurs mainly through endochondral bone formation. To this end, the role of KIF26B on chondrogenic differentiation of ACLp cells was examined, finding that knockdown of KIF26B instead increased chondrogenesis. It was an interesting observation as it implies that the decrease in ectopic calcification was predominantly through inhibition of the osteogenic pathway. This observation also highlights that KIF26B has a dual but opposite effect on endochondral ossification.

[0236] While the function of KIF26B on chondrogenesis has not been reported previously, many studies have demonstrated that loss of Wnt signaling exacerbates chondrogenesis (44,45), much of this can be explained by decreased Wnt signaling with KIF26B knockdown in these experiments. Intense Safranin O staining of nodules in Kif26b shRNA treated knees corroborated findings that KIF26B knockdown increases chondrogenic differentiation of ACLp cells. Additional detailed time-course studies using other techniques such as in vivo cell labeling and histology may be used to assess when KIF26B affects chondrogenesis and osteogenesis. The role of cellular processes such as proliferation and apoptosis in the development of ectopic calcification is still yet to be determined. Studies with KIF26B genetic gain/loss-of-function studies in murine ectopic calcification would be another opportunity to better understand the role of KIF26B in ectopic calcification.

[0237] In summary, this study explored the effects of KIF26B silencing on inhibition of ectopic calcification development in vitro and in vivo and identified crosstalk between KIF26B and canonical Wnt/β-catenin signaling during osteogenic differentiation. These findings demonstrate that inhibition of KIF26B is a potential target for interventions to treat pathological bone formation such as ectopic calcification and heterotopic ossification. This study also provides new insights into understanding the mechanism of ectopic calcification, although additional studies are desirable to fully capture the etiopathogenesis of this pathology.

### REFERENCES

[0238] 1. Scott M A, Levi B, Askarinam A, Nguyen A, Rackohn T, Ting K, et al. Brief review of models of ectopic bone formation. Stem Cells Dev. Mar. 20 2012; 21(5):655-67.
[0239] 2. Rai M F, Duan X, Quirk J D, Holguin N, Schmidt E J, Chinzei N, et al. Post-Traumatic Osteoarthritis in Mice Following Mechanical Injury to the Synovial Joint. Sci Rep. Mar. 27 2017; 7:45223. Epub 2017/03/28.
[0240] 3. Forsberg J A, Pepek J M, Wagner S, Wilson K, Flint J, Andersen R C, et al. Heterotopic ossification in high-energy wartime extremity injuries: prevalence and risk factors. J Bone Joint Surg Am. May 2009; 91(5):1084-91. Epub 2009/05/05.
[0241] 4. Rai M F, Schmidt E J, Hashimoto S, Cheverud J M, Sandell L J. Genetic loci that regulate ectopic calcification in response to knee trauma in LG/J by SM/J advanced intercross mice. J Orthop Res. October 2015; 33(10):1412-23. Epub 2015/05/20.
[0242] 5. Pacifici M. Acquired and congenital forms of heterotopic ossification: new pathogenic insights and therapeutic opportunities. Curr Opin Pharmacol. June 2018; 40:51-8. Epub 2018/04/04.
[0243] 6. Sinha S, Uchibe K, Usami Y, Pacifici M, Iwamoto M. Effectiveness and mode of action of a combination therapy for heterotopic ossification with a retinoid agonist and an anti-inflammatory agent. Bone. September 2016; 90:59-68. Epub 2016/02/20.
[0244] 7. Agarwal S, Loder S, Brownley C, Cholok D, Mangiavini L, Li J, et al. Inhibition of Hif1alpha prevents both trauma-induced and genetic heterotopic ossification. Proc Natl Acad Sci USA. Jan. 19 2016; 113(3):E338-47. Epub 2016/01/02.
[0245] 8. Sorkin M, Huber A K, Hwang C, Carson W Ft, Menon R, Li J, et al. Regulation of heterotopic ossification by monocytes in a mouse model of aberrant wound healing. Nat Commun. Feb. 5 2020; 11(1):722. Epub 2020/02/07.
[0246] 9. Mundy C, Yao L, Sinha S, Chung J, Rux D, Catheline S E, et al. Activin A promotes the development of acquired heterotopic ossification and is an effective target for disease attenuation in mice. Sci Signal. Feb. 9 2021; 14(669). Epub 2021/02/11.
[0247] 10. Rai M F, Hashimoto S, Johnson E E, Janiszak K L, Fitzgerald J, Heber-Katz E, et al. Heritability of articular cartilage regeneration and its association with ear wound healing in mice. Arthritis and rheumatism. July 2012; 64(7):2300-10. Epub 2012/01/26.
[0248] 11. Hashimoto S, Rai M F, Janiszak K L, Cheverud J M, Sandell L J. Cartilage and bone changes during development of post-traumatic osteoarthritis in selected LGXSM recombinant inbred mice. Osteoarthritis and cartilage. June 2012; 20(6):562-71. Epub 2012/03/01.
[0249] 12. Rai M F, Schmidt E J, McAlinden A, Cheverud J M, Sandell L J. Molecular insight into the association between cartilage regeneration and ear wound healing in genetic mouse models: targeting new genes in regeneration. G3 (Bethesda, Md.). Nov. 6 2013; 3(11):1881-91. Epub 2013/09/05.
[0250] 13. Chinzei N, Rai M F, Hashimoto S, Schmidt E J, Takebe K, Cheverud J M, et al. Evidence for Genetic Contribution to Variation in Posttraumatic Osteoarthritis in Mice. Arthritis & rheumatology (Hoboken, N.J.). March 2019; 71(3):370-81. Epub 2018/09/19.
[0251] 14. Hatzikotoulas K, Pickering G A E, Clark M J, Felix-Ilemhenbhio F, Kocsy K, Simpson J, et al. Genome-wide association and functional analyses identify CASC20 and KIF26B as target loci in heterotopic ossification. bioRxiv. 2019:845958.
[0252] 15. Miki H, Setou M, Kaneshiro K, Hirokawa N. All kinesin superfamily protein, KIF, genes in mouse and human. Proc Natl Acad Sci USA. Jun. 19, 2001; 98(13):7004-11. Epub 2001/06/21.
[0253] 16. Susman M W, Karuna E P, Kunz R C, Gujral T S, Cantu A V, Choi S S, et al. Kinesin superfamily protein Kif26b links Wnt5a-Ror signaling to the control of cell and tissue behaviors in vertebrates. Elife. Sep. 8, 2017; 6. Epub 2017/09/09.
[0254] 17. Huynh N P T, Zhang B, Guilak F. High-depth transcriptomic profiling reveals the temporal gene signature of human mesenchymal stem cells during chondrogenesis. FASEB J. January 2019; 33(1):358-72. Epub 2018/07/10.
[0255] 18. Cai L, Brophy R H, Tycksen E D, Duan X, Nunley R M, Rai M F. Distinct expression pattern of periostin splice variants in chondrocytes and ligament progenitor cells. FASEB journal: official publication of the Federation of American Societies for Experimental Biology. July 2019; 33(7):8386-405. Epub 2019/04/18.
[0256] 19. Steinert A F, Kunz M, Prager P, Barthel T, Jakob F, Noth U, et al. Mesenchymal stem cell characteristics of human anterior cruciate ligament outgrowth cells. Tissue Eng Part A. May 2011; 17(9-10):1375-88. Epub 2011/01/21.
[0257] 20. Blau H M, Pavlath G K, Hardeman E C, Chiu C P, Silberstein L, Webster S G, et al. Plasticity of the differentiated state. Science. Nov. 15, 1985; 230(4727):758-66. Epub 1985/11/15.
[0258] 21. Yaffe D, Saxel O. Serial passaging and differentiation of myogenic cells isolated from dystrophic mouse muscle. Nature. Dec. 22-29, 1977; 270(5639):725-7. Epub 1977/12/22.
[0259] 22. Reznikoff C A, Brankow D W, Heidelberger C. Establishment and characterization of a cloned line of C3H mouse embryo cells sensitive to postconfluence inhibition of division. Cancer Res. December 1973; 33(12):3231-8. Epub 1973/12/01.
[0260] 23. Tang Q Q, Otto T C, Lane M D. Commitment of C3H10T1/2 pluripotent stem cells to the adipocyte lineage. Proc Natl Acad Sci USA. Jun. 29, 2004; 101(26):9607-11. Epub 2004/06/24.
[0261] 24. Shea C M, Edgar C M, Einhorn T A, Gerstenfeld L C. BMP treatment of C3H10T1/2 mesenchymal stem cells induces both chondrogenesis and osteogenesis. J Cell Biochem. Dec. 15, 2003; 90(6):1112-27. Epub 2003/11/25.
[0262] 25. Katagiri T, Yamaguchi A, Komaki M, Abe E, Takahashi N, Ikeda T, et al. Bone morphogenetic protein-2 converts the differentiation pathway of C2C12 myoblasts into the osteoblast lineage. J Cell Biol. December 1994; 127(6 Pt 1):1755-66. Epub 1994/12/01.
[0263] 26. Puchtler H, Meloan S N, Terry M S. On the history and mechanism of alizarin and alizarin red S stains for calcium. J Histochem Cytochem. February 1969; 17(2):110-24. Epub 1969/02/01.
[0264] 27. Gwak J, Hwang S G, Park H S, Choi S R, Park S H, Kim H, et al. Small molecule-based disruption of the Axin/beta-catenin protein complex regulates mesenchymal stem cell differentiation. Cell Res. January 2012; 22(1):237-47. Epub 2011/08/10.
[0265] 28. Yan H, Duan X, Pan H, Holguin N, Rai M F, Akk A, et al. Suppression of NF-kappaB activity via nanoparticle-based siRNA delivery alters early cartilage responses to injury. Proc Natl Acad Sci USA. Oct. 11, 2016; 113(41):E6199-E208.
[0266] 29. Duan X, Rai M F, Holguin N, Silva M J, Patra D, Liao W, et al. Early changes in the knee of healer and non-healer mice following non-invasive mechanical injury. J Orthop Res. March 2017; 35(3):524-36.
[0267] 30. van Kuijk A A, Geurts A C, van Kuppevelt H J. Neurogenic heterotopic ossification in spinal cord injury. Spinal Cord. July 2002; 40(7):313-26. Epub 2002/06/25.
[0268] 31. Shehab D, Elgazzar A H, Collier B D. Heterotopic ossification. J Nucl Med. March 2002; 43(3):346-53. Epub 2002/03/09.
[0269] 32. Descamps B, Sewduth R, Ferreira Tojais N, Jaspard B, Reynaud A, Sohet F, et al. Frizzled 4 regulates arterial network organization through noncanonical Wnt/planar cell polarity signaling. Circ Res. Jan. 6, 2012; 110(1):47-58.
[0270] 33. Nalesso G, Thomas B L, Sherwood J C, Yu J, Addimanda O, Eldridge S E, et al. WNT16 antagonises excessive canonical WNT activation and protects cartilage in osteoarthritis. Ann Rheum Dis. January 2017; 76(1):218-26.
[0271] 34. Marikawa Y, Fujita T C, Alarcon V B. An enhancer-trap LacZ transgene reveals a distinct expression pattern of Kinesin family 26B in mouse embryos. Dev Genes Evol. February 2004; 214(2):64-71.
[0272] 35. Huang Y, Wang X, Lin H. The hypoxic microenvironment: a driving force for heterotopic ossification progression. Cell Commun Signal. Feb. 7, 2020; 18(1):20. Epub 2020/02/08.
[0273] 36. Bensaid S, Fabre C, Fourneau J, Cieniewski-Bernard C. Impact of different methods of induction of cellular hypoxia: focus on protein homeostasis signaling pathways and morphology of C2C12 skeletal muscle cells differentiated into myotubes. J Physiol Biochem. August 2019; 75(3):367-77. Epub 2019/07/04.
[0274] 37. Dominici M, Le Blanc K, Mueller I, Slaper-Cortenbach I, Marini F, Krause D, et al. Minimal criteria for defining multipotent mesenchymal stromal cells. The International Society for Cellular Therapy position statement. Cytotherapy. 2006; 8(4):315-7. Epub 2006/08/23.
[0275] 38. Zhang Q, Zhou D, Wang H, Tan J. Heterotopic ossification of tendon and ligament. J Cell Mol Med. May 2020; 24(10):5428-37. Epub 2020/04/16.
[0276] 39. Sugita D, Yayama T, Uchida K, Kokubo Y, Nakajima H, Yamagishi A, et al. Indian hedgehog signaling promotes chondrocyte differentiation in enchondral ossification in human cervical ossification of the posterior longitudinal ligament. Spine (Phila Pa. 1976). Oct. 15, 2013; 38(22):E1388-96. Epub 2013/07/26.
[0277] 40. Wang X, Li F, Xie L, Crane J, Zhen G, Mishina Y, et al. Inhibition of overactive TGF-beta attenuates progression of heterotopic ossification in mice. Nat Commun. Feb. 7, 2018; 9(1):551. Epub 2018/02/09.
[0278] 41. Meyers C A, Casamitjana J, Chang L, Zhang L, James A W, Peault B. Pericytes for Therapeutic Bone Repair. Adv Exp Med Biol. 2018; 1109:21-32. Epub 2018/12/14.
[0279] 42. Kraft C T, Agarwal S, Ranganathan K, Wong V W, Loder S, Li J, et al. Trauma-induced heterotopic bone formation and the role of the immune system: A review. J Trauma Acute Care Surg. January 2016; 80(1):156-65. Epub 2015/10/23.
[0280] 43. Hashimoto K, Kaito T, Furuya M, Seno S, Okuzaki D, Kikuta J, et al. In vivo dynamic analysis of BMP-2-induced ectopic bone formation. Sci Rep. Mar. 16, 2020; 10(1):4751. Epub 2020/03/18.
[0281] 44. Day T F, Guo X, Garrett-Beal L, Yang Y. Wnt/beta-catenin signaling in mesenchymal progenitors controls osteoblast and chondrocyte differentiation during vertebrate skeletogenesis. Dev Cell. May 2005; 8(5):739-50. Epub 2005/05/04.
[0282] 45. Wu C L, Dicks A, Steward N, Tang R, Katz D B, Choi Y R, et al. Single cell transcriptomic analysis of human pluripotent stem cell chondrogenesis. Nat Commun. Jan. 13, 2021; 12(1):362. Epub 2021/01/15.

The application's sequence listing, which the Patent Office published only in electronic form, follows.

SEQUENCE LISTING (44 sequences)

SEQ ID NO: 1 - DNA, 53 bp, synthetic construct
  source 1..53: mol_type = other DNA
cttggctcttcaagctcataactcgagttatgagcttgaagagccaagttttt

SEQ ID NO: 2 - DNA, 53 bp, synthetic construct
  source 1..53: mol_type = other DNA
ctgacaacctgctcatcttatctcgagataagatgagcaggttgtcagttttt

SEQ ID NO: 3 - DNA, 554448 bp, Homo sapiens
  source 1..554448: mol_type = genomic DNA
agttaccaagctcggtgaaggagacaagttcccacagctgactcggctcggctctcccaccttcccggcagcggccgcgagccctgattgtatccctcgctttcctcgtgggggagcacggactgacttggctgaagaaaatgccagttctgtggatgtggccgtgacaagaggacgtgcggctggaagaggcagaaggggacgaggaaaagcatgctttgaagagaagaataaaccagcgaccccaaccctttctgcaaattggtgctattacttgtgggatccatttgctttcattccctcccaccccaccgctgaagaaaccttgccctgagggctgagagccagccccctgcagccgggggacgcttctgggttggaggaccttctggatgtagcgtcggtggaacctttagatactctcctctggaaaagccaccatgaattcggtagctgggaataaagagaggcttgcggtctccaccaggggcaagaaatacggggtaagttgtgacggtacgacgcggagacgcgttaccagacccatctcggcggaggtccccctttccccgggatcgtgcggccccggccccgagctctcccccgctgcagaggcgcccccggggctggcggggttgtgagtgcgcggaggcgggtcggccgcggggacgcccgcacgctcgcctcgctctcggaattttttcagccctctcgttccttcctttccacgcacccgtaacttttgccgcattcctgcacttctaggcagagtgaagccgaaggggagggtttcccatgaatgctgggcagtacctcggatcgtttagctggagccgtgagagcctctcgtttacctgcaggatccggagagttggaccccgtatgaataaaaatcctgaaatcacagccctccccctaccccccccatagggtcttccaggattttgttcccgggatcttgctgggataggtgccggcttcaaaagcgtggggcgctgaacctatggatcccccccgccttgcagaagccgtggaaacggccccgagcgagtccccttcctgaccccaggaggaggccaccggggaccagcgcaggggtcacctgggcggtggggactcacttaaggacaattaacgagacagacggagggcaatttggccgcagggcttggagaggtccccaaccgactcccgtgggcggttcgagcgggtacttggtggcgcacgtatgacccagctcctgggcgctgcagcccgccgccttgcagcccctgacaccggcgtgtcttccccgcaggtgaatgaagtctgctcgcccaccaagcccgcagcgcccttctccccggaaagctggtaccggaaagcatacgaggagtcgcgcgccggcagccggcccactcctgagggcgcgggctcagcgctcggctcctcggggaccccgtctcccggctcgggcacctcgtccccgagctcgttcaccggctccccgggacccgcctcccccggcatcggcactagttcgccgggctccttgggcggctctccgggcttcggcacaggctccccgggctccggcagcggcggcggctcctcccccggctcggaccgcggcgtctggtgcgagaactgcaacgcccgcctggtggagctcaagaggcaggccctgaggttgctcctcccggggcccttcccgggcaaggtgagcgccgcgcggggctggctggggaggcgccgggagggcggggccgggccgccacccacagcagctgctcagcccgccgcgaccttgcgcgccggctccacgcgagagcccccggcggcgctggggatgctccacacctcacggggctctagcacgcggggcgacccatgccccttcctcagccaggccgcccggggggcaggaggaccgagtcccgagcgcgaaggggcgcccgtggccacaggcctcacggcccacgggggaggcccccaggtggtctctcctgccgccccctcccagctctccctggcggctgcaggctgcgctttcgatgtttctccccacccccacctgtgatcctttacaaaaatgtcagcgggagctgtaaaagcaagctgatgctcggagctggcatttcccactgcctgtttgtggtccatcctttccgcggttgcagaaacagaaacatactcgaaagccagcattttccccttctcagtctgtgtgtgtgtctgaggaagatccggaggcgggtggctcttcggagcagtgctccctcctggcctgctcctgcgccaagcacactggttcctccatagcaaccctgcccgcagtgtgtgactggcccgagcccccaggggatagcaatgcgattgtatttgcactgttgggtccaagtactatcaaatgatcatatttactcggccacttcaaagagtttttatcagtggttagagagcaatatcaaggaaatagagtggattgctgtagaggtttttgacactgttggttcaacgtcaatttctggtttattatttccgtgactttagaaatgaaatactgtgatttcgagtaggcgtttaggaatgactgcgtctgctggcccaacctgcgtatgcagatacacacgttgatgttttcataggcaagggttaaattcaacaaatgcccacagacgctgtgaaacttaaaatgggggaaatgaccaccaggagaattggttttatgaatgcagaacttatctcaagaataatgaactcgtggatggttgtcagtgtaccgtttttgtagtttgatacatctgccgtgacatcccaaggatacatctcaaggaatcaaaaagcttatttcgctcttgcgtgctagaccttccgatttaacaccgtttcttcattcacagatttatttgctctcgtgatccttcatcaatattcattgattttctactccatccgaggcactgtgtcaggcacagcaatgaaaataccaggtccattcatgcagtccttgtccacgtggagcttagattctagtggaggatacagataacaaccacaaaatgcacagttcacaatgtcttcacatttgtggagggaatgtagggtgctgtgaggttgttgaactggatgggagcatctgataaagatggaaggaccttggttcttaaagatctagtagctgatatttggcagtcctaatacgttacagcctaccaaattattttagacctttcttgaggacctattcttataataggcttattgtggctttgggtgttcctatatgcaaaggccgatcaaaatacactcttctcatttaaaaaaagaggaggggaaggaaaatctacagaggaaacaaatgttgaaactcatacgcatccatcatgttttatggagtcctgtgaccagctggaatcttgtttttatagaaacagcctggaacattcacttacagtgtcacgggaggcagctcaatatatttgccaattttatgtatgtgataaggtaaaactcttgttggtaaactgattgtattgtcagagtgaggtgatggccccagaagaaacactggatttgctgaacccccatgctctacaatgacttcgagtgatccaaggacatctagagaagacctggcagtcatgggggcagtcacaggggatcactttaagtgcatacgtgaatgtcacatagtaccacagtcgcctgagttttatatgtgaagcagcacagtaaagcgtgacatttggtgcaagggcatagacagggctcagccaggaagaaggatgctttgcatcagctcattgttagtaatgagatgtggggcctcaattttaactacaaaatttctgcaagcctttgtgaataataattgtgtgtgtgtgtgtgtgtgtgtgtgtgtgtggtgtgtgttttaagcatttgtaccttgcatttaggtacaatttccattatacctttagcatttgcaaccttatagccaaacagttgccatgttctctggtgtaccatggatggaggccatgtaacttggataagacttttcttcttcccggagcaatattaatgaacaaactgtggaccactgtagccctcaggcacagaaggagttaagtttcattagaacaagaggtgtcactgtgactccaacatgcagttcgctcagttcgctctgaagagtaagagtctggaagataaagacatgtttttgaggagtaattaacaaaaatcatctgtgtaatttgcttaagatgcttacctgcatttgggaaatattttcttaaatagagtgttaaattctactaggtggtattaaatgtctcctaggtagatatttaaaagtcaaaagcagaatagcacatccaggaaccttaatattttaggatggatttggttttggttcttcttcaccactgatttactttgtgacattgggtaaattagttttcctctctactttttaactttcctattaatatcctaaggaaaaaaatgaatgagactattaaaacgtcattaaaatgatccaaggtaaggtctgaaaagtgctttcattctttagagaaagatatgagggttgatgattattaatgagctaagattctgttagatttatgttttacagaatttaaggtttttcttataagatattactcctgtcagtttctaatttcatctgtatattttctaaacatgctgccatatgagttctcacactgtgcctgttggtaggtagcaagccctattgaatcccccgttctgtctttggaacagttggttaaggaggggaggtgaagtagtagagagcccattccgggtatctggttggttccaggagctagtgcctggctctggtggcctgagaagaaccatcttattctgagcactccaatggaggatagggcttcatggtagaaaatgacattatttgaacgtaacggagtgggtgatagtgttggctgaggtaggaaataggaggagacatggaattggatggagctcagagggaaggatgatcatgagtttggttttccatgcagcgagtctgagctttctggaaagagatggaggcagatttaataataaaacactttgtttttggctatctcaagactggcgtgtagaagtgacagctgtgagctcacatagctctgctgttgatactctgtattcatcctttccgatagcaacttacctggtgagtagacgtttgtgcttggtggcagattgtaaaacactcagattgacttttattaccttgatcagtacaaaaagtacttactgggtttatatcgtttctcttttggtgccggtgagtggaagtggtcggataaaagaatgtggacgtgtaaagtgttgagattttaagtgagaatggcccttttacccactgtagccttccagtgtgtgaatacaaaaccatttcatgtccaatggcaagagcatctttcctgctttgtacacagtcagggcactgagccagaaataggggccaaggaacgaattgctcaattttgggctagcctagatcattctgatatctgtgacagaacttttgaatggactgggcaagtcctacgaaacaacagcccaacgaaattccctggagtaagcagtaaagctccaggttggcaaaaggttatcagacatctgttcatttccatatcaataaaagaaaatcttttatgtaaaaaaaaaaaagtgcagaactatgttcctatctgattgtctctcagtcagatattctgagtccatttatgccccagaaatatcaggaagattagccagacatactgagaagggtggccaggaatcacagagatgaaagaaaggaatgcgtcataggggttaaaaacgccaaacgtggactctaaatagccggagaccaagtaagtctagacttgaggagatatagatatccccacatgcatatttctgtattttgccagctccaaaagaggggtatggaaaaataactagacgcaaaaagtcccccaaaagccatcataaaacattttatagataggataaaacagacattgcatttcgagtacttattaattataagggacttctagctgaaatcttctctttcttctaagaacatgtggctattttcaaaaagcttcatttgagtctttctcatatcagaagtattttagataaaggagcagttagtagataatagcagtcatgaaaaagtcctacagcatttatcatttgaaaatttctgaaacattttgggagtttataaaaacattcccaggagagacatgtgagcagtaatctctttttaaggcttagcaagctgtggaataatggcagttcattctaccagactattaattgtgaagcaacatggtcagtttttatagtgacttaattcactttgcaaaaatccctggcctgcaataattccttccacacccattgcagataggattactacattagaaatgtgatttttaaatggctgaggctggtagtttgtcagcatttggaaggattaagtcaattaaaatggaggcaacatcagttgccatttgttatttggcattatatcacagattgtaccatgagtgggccaacaatagcgatgatagtaataataataatatgtaataaatggctaacaacgattgtcctacataccacgaactacactgaaacacacacacacataatctcatatattaaaatgaagatgaacgtgattttttcttttttaccctggaattccaagtgcttgatgtggttaagatcatagaaggaagcatgaagaaaaaatatgcaaggaacagagaaatccaatcacactttcccctagaagctgttaagggtccctgtgagtagaactgactgagtgagaggcaccggctcgagatggttattatttttcctgggctcacagatgagaattttacttccagtgagtggggaggttgggggaaagtatgtgagactgtcaggttctgagttgaggaattgtcttggctggaatgcaaggggcggggggaaggaacctccttatatttacgtgcacccattggagaccctgttgtcatcccttcctgaacagaaaaccctgcccgagggccccgtcctgaccttctgcgaggaagagttcttcagccggccatttcagtgccccatcggcagggcggccagacctctgctctgttttgtcctcaaaaagattgcaaattggctggtgtctgggagggttcttggtcattttgcaggaatacaagacaaatttcctttttaccactctctgcagtcacaagctattcatcagcatcctttctttcctgtttctcgtctatggtgttattgtggcgaaggagcactgttgagaatgtgctcccaatcgctcttttatacctatagatgcacccatcagaaatatcttttttttttttttttttttttttttttgagacggagtctcgctctgttgcccaggctggagtacagtggcgtgatctcggctcactgcaacctctgcctcctggattcaagcaattctcctgcctcagcctcccgagtagctgggactacaggcgcccgccaccacgcccagctaatttttgtatttttagtagagatggggtttcaccatattggtcaggctagtctctatctcttgaccttgtgatccacccgccttggcctcccaaagtgctgggattacaggcagaaatatcttattttaaagtacattcgtgtagatgcaaaaggactggggatacacctgtattcctaatgtacttttgaaatatttgtcaagatatcaactcagtttgtatccatcattggcttaccattgcctttggaactgctccagagcctatctgagaaaattggaaatgagtgattgttaaaaagatgtttgtccacctccaggtctcaaagaactcacctatgttttcttctagtatttaaatagtgtcctttttaatatttagatctctaatccattgagagattattttggtgcaaaatgaaagatatagatcaaatttcatctttctctaaatgtctatccagttgtccccactttattaaaacattcttcttacttgcagacttcttcttgtgaaaaaaagaatttatctttctcacattaattgaagataccaccattgtcataaatcaaattttcagttgtatctggacctattacaggatcttctagaatgttctcactctgttgtccaggctgggttacagtggcacaatctcggctcactgcaacctccgcctcccaagttcaagcagttctcccgcctcagtctcacaagtagctggaaatacaggcacggaccaccatgcccagctaatttttgtattttcagtagaaatggggtttcaccatgttgtccaggctggtcttgaactcctgacctcaagtgatctgcctgccttggcctcccaaagtgctgggattccaggtgtgagccactgcgcttggcccacactattttaattatggaagctctgtagcatgttttcatgtttggcagggctagctctctctccctcaaatagtgcctttcttttctaggagtttccttgcctaactccaatttttttttttgttaggaccgtgttgaatgtatacattaacctgggggaatagttggcatctttatggtgttgaatctttcccaagaacatggaataccttttcatttgaacaagtctactttttagcaatttttaagagtttcttcatataggctttgcacatttcttgttaaactttttcttaggtattatagcttttgttgctattgtaaatggagtcttcactttcattatctcttttaattgataattatttatgtgaaggatattgatctacatgttttatatcccgtcgccttattaaattctactatattcactgatttttaaaaaattggtactcttggattttcaaaaaattttgtcttcttcaaatacagatatcattactctcttcctttgctatttttatgcctctaagtgttttctcttttttgttacattggctggtactcctgacacaatgttacataatagcgatatagtgggcatgtgtatatatttttttctattaagatgttggcttttggactgagatctgtctatattttttaaagttaagtaaatatccatcaattcctactttagtgttttattaggaatgggtattatattttgccaaatgtcttttcagtatttagagagagaatcatgcaatttttctccttagatttgttaatattgtgagttattattattgattttctaatagtgaaccatccttgtattcccataataaaccccacttggccacagtgcattttgaaagatatgcttctggatccaatttgctaatatttcatttattgtttttgctttgatattcatatgccaatgaacatttttgattcctgtttatgtgccagttctagtactatgccacattataatccaaataggaaaaatactaaaattcctgccctggagcaactcacagtctagtgtcagagacaggcaaggaacgtggcgaagcgtaagcgttccagccacaggaaacggcaggcataggccaggaaggggtgatgcgtgccccctacatatggggaactgaagtcgcacatggtcaccatacacagtatttgtatgagtgcgtgacaggctggaaaggaggcagatggaggatgaaaggccttgtaggctataggctggactttatcctgtaggacgtgggcagccattggagggcactcatgaagggagtgaaatgatcagatatgcatttaagaaagattgctggccaggcacggtggctcacgcctgtaatcccagaactttgggaggccaagacgggtggatcacctgaggtcaggagttcgagaccagcctggccaacatggtgaaaccccgtctctactaaaaatacaaaaattagccgggcgtggtggcccacacctgtaatctcagctactcggggctgaggcaggagaatcgcttgagcccgggaggcggaggttgtagtgagccaagatgatgccactgcactccagcgtgggtgacggtgcgagactccatctttaaaaaaaaaataaagattgctgtgagaatgagcaagaagatgggttggaagagtggtgtcaccgagaccagttgggaggccccttgcagtggcttgagtgaagaatgacacagactgaactagggtagtacagagggaagggagaggcagctccggcctgacacatatcatatgtagaaaacccgccatggggagctgctgagatacggggccagagggagaaaagatgatgcattctcccaggtttctggccagggaaagtgtgtgggtggtgctgccagttatggagatgaagaatacaggcagagaaggggttttgttattgtgagcccagtgttcgaggatggctgtggatgttaaattgattggggtctctagagcttgaggtggaatggtccaatgggctcctgttggcgctctagagcggcttctgaggtggagatatggatctgggggatgtcagcgtagagaaggtgatggaatccacagacggcatgagctctccacagatgtgtggggtgagacgacagacagctgaacatgaagtggtggagaccattgacatcgaagggaccagtggcctgaggagctaagaagacagaccaagaaggagggaccagaaaagagggatgaaaaaccaggagaagacagtgtcatgggaactgaggaaggagtgagcttcagggcataggggtgacaaaaggtctgatgccctggagaggtcaaggaagtaaggactgaggttttctttgaactggcaaggaggaggtcattggatgtctttgttggaagaatttctggtgccctggagaaagccaatggcattgtgtccaggaatagattgagaggtgaggacatctcaggcagcatttgagttgctgaggacactgagatacaagagatccacttcttgaggctcttattatcttaaaatgaagaactacaatcaacagacttgcgtgcaaaaccaggctccgtcacttagggtgtgaccttgggcaagccttggtctttctaaacgtggttattctcatctctacagtgggagtcatgacagagccccaccaggaggatcgtgaggattaggtgaaattgtgagatgctagtcaaccatcgctttctgttattattccagtgactttccacaggaagttgaattttatataagattcctaccctccttccttccctccttccttccctctttccttccttttttccttccttccttccatctgacacgaaaatggagaaacagcagtcagagaaaatgaaagcattcagtgcgtctttgtttcttcacctccaagtggataaagcatctcattcttatttattcatttgtagagttgtcaccacagaaagtttaagggagctcagtggatgtaaatagcgactcctttgggttgaggtgccatgaatatggattgagagttttttgtcacagatggaaatcccttctttaagcccggcccctctcgtagcccctccagggagacttgcagatgtggcatttggcatttcggctccggggaatgagggagagcagatttcctccagtgactgcgcatgcgatgtgcagatctgagccgcaccaggaatttgggcttatctgccttccaatccagctttatctgtctcagacggttttctttgcagttgtactttgctgatcctatcacatcgattccaaccagaccccatgggaagtctgggaataaagaagtcaccctcccccaccaagcaggatatcctgcacatacatcagctctcagggctggaggtgaccgtggaggagagggatcctgtgagctctaatacaaaaaaccgagacattctgaacgttgctatagaggttagcaaagcagaaggctctgagggtagagtaagtattattaattttttaaatatgcagaacgataaatatgtcttaagtgttatagaccaggttacagctgagggactattttgattttccttttctacttattggagtttacgttcaatactgttgccaaccacaaaaagttattggaacaaattttagctctccacacagcatggttctaaaatctttgatggttcttacgtgtaaactttctttttatataattgtttttttttttgcttgaaagcatgagctgcaaataataaattaaaatccgcttttctatcacaggggtgacaaatagaaacttttattttgatatgtccttatctaagtgatgtctgaggtctgtatatgctaattcaggattttttttctgagctaacctaggaaccgatagaacttgagatttttctgcagtgtaattttgtctttgagttggcagtgatgagcagctacacttccccatgaaactctatcatcgtatttagagtggttgctttctttggggttataatcactacttcccaacccttcctccacctaactggtggcttcacacaagaatgggagactcacctattaactgattagaagccagcaataacaaccagcaccaaaagctgtcgagctatctaaccaaatggttgtacagaaaataaacagctgaattcaggcaaacaactggaagcagccaccattgtttaaaaaaaaaaatcacctgcccagttcagttgtgtaactttgcacagcagggagtctcagtcctaagcaggtggcagagtgtcttccccatggtaccatggctgggaattagagcatcaggtgtcctttaccaagacaggcagcgtggtgatgggggctgagggatagatgggaggaggatagaaaggagaggaataagaggggaggaggaggaggacggatgagagagagggcgaggaaacaaagaaatgggtggtatacgcatccaaggttgtctacaatcccagatatttaggtgaaaaaggactgtccttggatctggggacagaggtgcagtcctgcttccagcactgataagcattatgatcttgggagaatcacctagctggcctgtgcttgatttttcttttgtaatctaagagcatggtagtcggtgggctctaagcttctcccaagcctgtgagtctctgtgaagctgaggctttgggagtccactccgtgaacccagattccacagggatgtgcctggcaaaatccaagtgggtttctggctgaagctgttctgtgggctgccatgtttgtgggacatctcatctgcagccgccgcagcgacctccttgtccgtccagccaaggggagggaccggaagccaagcggaggggccggtagcgccgtcgttgctgatgcttctgcttttggaattcggatcataaactgacagggttcttcctgtttcttaataaagctatttgttttactgtctaatgtgtttctaagcagaaatagacaaacaaaaggacaattgattctagaagagagatttagtatggagtatttgaagaaaagtattgccttagaaataaggatgttttgtagttaattttacattaaaagttctgccatattgattaggatttagaaataacatacgaagagttcttcctgagtagcagtataggaacaccagaactctataaacattttattcatcattcttcatctgatttttttccaaaatctttttgctccctttgatttctctctttttttctgctctttcaaatgcctagacagagccatattgattaggccagtatttacatatcacatgcccctgacgtgggtttaatgccccgtagtgtttgatgctgtggtctgggaaagaatggaacaggtagctgcccgctgagtcaacgaggcccatgcagttatcatcgatttttatttttctctttaatcatttagccaaggttgcctctttaaaatatctacttcctgggggatgtttccctgactcttatttcaaatctaatactttgtatttgagtctaaacacaattcagggaatatagctattaaaagcagaacttgattttgtttaactagtccagagcgcgtgatggctttggagcagagtggagaacaggcacagaggagcacgagccccaggaacaccacttggtgcccctccctcgtccttccaccgagctctctgcacgtatcttaccagggcgtgaatggagcattctgcagccagacacatccaacccacagcaaaccctccatgcaagcttgcctgtgtcctcagacattctaccctttatttctcctcttgttctttgcccctaagtttgtccatgcactcgactttctaacgggccatggtgtgtgtgtgtgtgtgtgtgtgtgtgtgtgtgtgcgcgcaagcactttgtggaggccctgaaggcagcatgtaaggtggtaacacggtagacattctgccccaggtttcagacattgttaggctgaagcttttattggaggtcaaggcagctaataaagtgggccgtgcaattacaagagcattcagcagagaaggatggctgaccctctcggcaggctgagagcagaggaagcggttggcagctcctagtcctcccatgatggctttacaagcattttttgcagccggggtggtaaatgcgatacaaaggcatggtttcaatatatccaatgaggcactctgcttcctgtgtgaggcatccacttgggggaaggaagttgcccggctgtgggctttttgtggtggtggtttctgctaatttaccttttttatagagggctcataattattagggatcctccataatgcccctttatggtggtcaggaaggagataacaaaatgatgcagaggtttaggaggcttctccagggtcacccagaaaacctctggattctgaatctccttcaaagatttaagaggatttatttatgctgctctcttgcccatgtggatctccttgacactacactccgtgagcgtagttaatgtcctgtcttgttcactttgttttttgtttggtgcctgtgtaccaagtagatttctggtgttttgaaaaaaaaaatcacccgtccactgctgcataaccaaaacgtcactggtgtgaaggaagaggatgatagaggatgggacggtggtgacaaatggcgggatgggagatgatgcctgggtgagtcctggaaagtgccgtgatgccatcccactgacatggcctcctgtattccagcaaagagtgaaattcacagggagcacagagtaagagcagcgccttcacctcggtggagcttagtctaggcatttatgggtcggctggtttgagggtccttgcatttcttgtcagtcaatacgtccttgttttggctaagtctcatgccctcatatccacttctacccttgcagaataaagacatgtgggaatgctcactggatgcttacaattggttccaggtgttccagggacgaaacttatcagaaccaaacatagagggcaaatgtcttagccaattcatgctgctataacaaaataccacgaactgggtggcttataaacaacagaaatactgatttctcacggttctggaggctgggaattctgagatcaaggccccatcagattgagtgtcttgtgaggtctgctttttgattcatagatggcactgtcttgctgtgtcctcacgtagtggaagggactggctagctctccagggtctgttttgtaagggcaggaatcccaattatgagagctctgccttcatgacccagtttgctcccaaaggcccacctcctactaccatcactttgggggttaggtttcaacatgattttggggagaacataagcgttcagtctgttgcagcaagcatgaggtcacttgtctagacactgacccctcaggcagtgttcatgtttggtttaatttttccctttatctggtaattgattctgcactgtctccattatttggtgagatggtaacatgtgattacatcccaatggagttgggcatgagaataagaaagaaatctccctttaaaggctttggactaccttggagtttgaagagagtggaggaatgcagtgagctggttttgatcttttggtgaaagtgacaaggaggcaggatggtttttccacggacattgacagggtcgtgctggttctcccaaagagaaatagagtagagttcatcacattagttaagagcacctcttcagcacattatatctcttcagcacatcgtttaagagcatcgtctttaataattcttacatggggcccgcacggtggctcacgcctgtaatcccagcactttgggaggccaaggcgggcggatcacgatgtcgggagttcgaaaccagcctgaccaacatggtgaaaccccgtctctactaaaaatacaaaaaagttagctgggtgtggtggcacatgcctgtaatcccagctactccggaagctaaggcagaagaattgcttgaacccgggaggtggaggttgcagtgagctgagatcgcgccattgcactccagcctaggcgacagagtgagactccatctcaaaaaaaaaattcttacatgggacaaaaatcactatcctatgtcaattgaaataaaggccattagtttttaacactgtataaattgccttttctcctgggaacttcagcatattcttttaaattattagcattttataatcatagaacgatggcatagagggaacctacagggtgtccagcattgcattacagttccctgatgaagagcatggttcttggggtctggccatcccatcaggatttgtatattttgctctgccgcataccagctctgggaacctagagaaggccttaaccattttccgtgttggtttcctcgcttgcacgatggtgttaatcataataactgcttcacaggcgtgttttgtctgctgcatggtagtcattcattaaatgtgagtatccaagctcccatcccaaactgccagaagggaaaagtaaaacttacacttttagacagcgacctcctgactccagggttcattccatctcattaacagtcagttcattcatttttcatttccttatccatccacctgtttgtttatccactcatctacctgtccagcatttctttggccttcaccgtacattcgtgtgtctagacttggtggtggggatgtaaagatgactaagacgcagcccttgccctcaagtccctcccagtctggtggggggggtgggtacagaagccacgtggtaagtgcagagttaggacacttggggagcagccagcatggctccgggctgctggaacattgcatctttcttttcttacaggccccgcctaagaagtgtcatggctgggagggagtcggaaggggtagcttcctagaaggggtgatgatggagaggagttagtgagagaagactgaggaaggtgaggaatctcatagctagagaccagaaacggccttgaggggctgcaggaacccaaagaaatgcagcattgacagacaggaggtgtccaaagtgggtggcccagctgggcatggtggctcacacctgtaatgccagcaatttaggaggccgaggcgggcagatcacctgaggtcaggagttcaagaccagcctggccaacatggtgaaaccccatctctactaaaaatacaaaaattagccagatgtggttgtatgcgcctgtaattccagctacttgggaggctgaggcaggagaattgcttgaacccaggaggcggaggttgcagggagccgatattgcatcactgcgctccagcctgggtgacagagcgagactccatctcaaaaaacaaaaacaaaaacaaaacaaagagggtggcccaccacatcaatttcacaagaagtgaaataacaatgtaagatttatatgtcagttttaacaagtgatgataccgtgtaatacatcagtatagcagtacgatagccatgttcatagcagccttattcacaatagctaaaatgtagaagctacccaagtgtctgctgacacatgaatgactaagcaaaatgtggtatatccatgcaatggaatagtatccagccctaaaaaaaggagattcaggcacaggctatgacctggatgaaccctgaggacattatgccaagtgaaataagccagtcacaaagacaaatattatatgattctggtgatatgagatacttagtgtagtgagattcatagacatagaaagtaggatggtggttaccaagaattggggaagatgaaaagaattctgcatatggaaggtggtggtggttgcacaatggtgggggcgtacataatgtcactgagctgcacgctgaaaaattattatgagaggtcaatgttatgttgttttactgggcgcacacacacggaaagtagtataagttgtgtcacaaaattgtatttgacggaagtgatatccctgtgcactggtcgcccagtgacggctcatgagggtaatcatggtaatacgtacaatctggccaccagagactcccaagcacgttacaagcagtctcacgtttgatccaccctatgagacaggccactttacgggtaaagaagctcagtgaggttagatgcctggagacgcgggccggggaggctgtggtcctgcactcactgcacagcccttcctgctccccggcctccctgtgaggctcactgcagtcccttggagggaaaggggatgctattgagaattggggccaggtgaatggctatagagggatgcaggagtcccccccacctttttctctcctttctcttacttccacggaccttctgagaatagggctggccctggcagccaagagccccttagctcctccctctgcatttgccgtggtacgacgtgtgacacgggccagacccacgctgctctgttctgcaggactcagtgcaagacagctcttttatttgtgcctgtggtcgttagaaaagttttacacgggcagggcagtcgtcatcactaagtaaacacattgagccggcaaatcagtctttgtgagagcagcacattaaatggttccctgcatagtagttactgatacattactataattacatcgcacattttgcagtaaactccaaaaaaatgatttattatctcttgggtgcttgacagcaatatgctcaatggcagcataacttttccaaatctgcccacacattttatgtgtatgactcttttggaattagaccaaatggacccttttaaagatctgctgagttaacaccaccttatatttatatggctgcgttcttcaggccacactgtactgggtcattgccactattttcccacctttctctttacacccctttaaggagtatcatggccagatgtggcgtggtgtctcttaaattcacttaatagacaaaagagaaggacatctctaacagtaatacaagaaaaaaaaagagagagaaggacagagagaccaagaaactctttttttactcctattcagcaactatgtatgtacttatttatttatttatttatttactgagacagaaccttgctctgtcatccgggctggagtgcagtggtgcaatcatagctcgctgtaacctcaaactcctgggctcaaacgatcctctcgccacagcctcccaagtagctgggactgcaggcatgtgccaccacacctggcccctcagcaactatttttacagtatcgactctgtgtcaggcgctgttctaggctctggacgcttgatgagtgtcaccagtgagcttaggacagagctgacgtcttctgcctattctttggctttactccccatagggcttttctggagaagggccctttggagcttgtgggatttcagggtttattgaaatttatttacctttttgcaggtgtctcatgcttcctcggttaaggaatgggaattatcataatgtataccatggtgtctggccacagatgaagtaccacagtcatcagattatgaagcctccaagcttctcttgcagaggactccttcaaaccactctcgtggactgtggctaactgggagtttctcctgggggcccattgctcattccttgctgtctctcccggttgagacttcccaccagggtgaaaagctagaacagtggcttttgtctttagcaaggccattagatggtacagtaactgctttcagatgctgctgatgtggcccagattcagcatagtgacccagaggtgaaaggctacatattccattacaacccctagccaatctgcctccagactctagtgcatttcagtagagaaaggaaggaggatagggtgacatacacactagatagcagctagaagtaagtctgggaaaatctaagaatggagcttcaatttctagagatgcttttgtaaagtgcattacttatgtgctgtgaacgtgatcatgatggattattcaggtaaggtggagacgagaacacagagaatcagaacagggaacttggaagaggcaaagtaaacaggcatggttgcctgtttattttgaggtttcgggtggctattagccctacaaatgccagctaagggcaaatttctgttggttgagattctttgagattctgtcaatgcaagattttttaaaaagcaagtataaaagatgagaagatgcagttttgtggcaaagcgtagaaagtcactaagtccacacatgattaaaaatagtgaagagaccataattcaagtcatatgatctcttttattgtaatcatatttactcaaaagcctcttcgtttgttccatttctaattgttttctcttcttgtgtagagttaaaagagtcacgggctttattgaagggtggagaaattttattttcagaaattttgcctcaatgtttattccctgtgagacactgacattttcttctcaaaacatatatatctatatctatatctatatatttagatgtctatatatatagatatctatatctatatatatagacatctatatatatagatatagatatatagatatagatatagatattttttttgagacagagtctcactcttgttgcccaggctggggaacgagctcagctcactgcaacctctgcctcccgggttcaagcgattctcctgcctcagcctcccgagtagctgggattacatgcatgagtcaccacgcccagctaattttgtatttttagtagagacggggtttctccatgttggtcaggctggtcttgaacttctgatctcaggtgatccgcctgcctcagcctcccaaagtgctgggattacaggcgtgagccttgtaattacaggtgccttgaaggcgcctggccttcaaaacatatttgtttagggaaaagtagtgtcagatctatgaaggtcatactggaagttgctaataagtagaatgccatatttcatggaaggagaccagagttcaggaagcatccttcccacagggtctatcatgggatttagttccttctttttctgcatcccagatgttcctggaggtgcatacttgctggtaagcctggagttggagggatgaaagctaccaaaggccctgatgggtgttatataagatgccacgtgtgagccactccccacaagacgccaacaagcagggaacctagttcagcactttcatacccagtctaaaggcttctaggaaactgtgggtcagctggcccactcctattaaccatgccttcatctgtagtggaaggaacatggctcacaggatgggctagcaggcgatggggcctttgactttcagattagtcttcctgcgacttttaacggtcatgtttacttttgaatataacctgggatgaagcatttatcagcctctggtacttttgtgaattggtagtttacagcgggcttactggtagccttggccagctctttgccataaaatctttaagcatagacacacaggggtatggccattccctttatttttaattaattaagtagtttctagagggagggtttcgttctgtcgcctcgactggagtgcagcagcatgatcctagctcactgcagcctcaactctctggctcaagcgatctgcttgcctcagcctcctgagtagctgggactacaggtgtgtgccatcatgcctagctattttttaaattgcttgtaaagatggggtcttattgtgttgcccaggctggcctcagatgcctggcctcacgcctcctgccttggcctctcaaagtgctgggattataggtatgagtcactacatctggcccatgagtcactgcacctgtcccattccccctgcctttattgattcctacttccgcctaggataacactatctcttaaaagagtgttgccaagaaaccccatttttttacattctatattgtattttaaagaggaaaccctatttagagatatttttgtgggaatggttttggagtttcaaacttctgaagaacctggactatgttgggggcatttacggtggcagtgcacacggctcacactgacgaatggctcggctgagcaagccagtgaagcagagggcaggagaggtgacttcctggcatcctggatctctgcaaatgaagttgctgtagcgccattatttacctcactgtatgtgaaatgaaggggtaggattcattgccttttggttttgattttacttgtccttaggggtgtgtgtgtgtgtgtgtgtgtgtgtgtgtctttccccctggccttctggtgacggataatggtgatggcagtttaggcctgtttctgattagtaaaatgacccttcaaatgagactaggagaaaaatgctctcctgaacctctggaaccctggtttttcctatcacaagtttaatggcttcaggtcctatgtttttagccgagaaaatgaaagactcagtcagcggggattagggttttttgtttagagagaaggtaaaaaggttacatgaagatttggtgtgggtttagactggggttagcctccacgtaggaaaggtctgaagatcgagaatgaggccaggttgtgcaggtgagcagagctatctttggcagctagattgggatgtttctgggcagagatatttgtcccttaggagtgtatcaaatcacagaggtcacatctgactgtcactgctttgttacaggagaaagacctgttcatcagaataattcctacgctttgagccacttattcaagtgatgctagtcacgttcagaaaacagataacctaccatgtgtttgtgctgtgctaggagttctagagctttcaagcacaaccgtatatccgaggttgactttggagctgtcatcgtgggtttggggctgtattttaaaataagaggagcggtgtcttttgggctttgcttttttttcaaatgcttttttctgagtcccttcagtgatccattcttgagctgtctcttcagtcgtcagtctcttggtagtctttattctaagtttttttcctttttaattgtagtaaaatatgtatagcataaaatttcccatgttattcctttttaagcgtatggttcagtggctttaagtaccttcatatcattgcacggccatcgccaccatccacccacttccatcatctcaaaccaaaactccaaatgcattaagcaataacttttgttattaaagtgtttaataatcactttggtgctgtttaacctctttaccctgatttcctccccctttcttgctccttttctagtagtttctactaatagatcacctgagtaagactgcccgtgtcaagcctggtgtcaccttaggttttggggataaaggctggtggtaccgcctgtgacgtgggcttgccacatgcagtgtctgagtggagggcaagtggggccggctctacagccatccgagcagacgggggctctgtcccttactcctcaggcacctgacgttggacttgcctctgggtaaataattcttatcaagcatttacttggaacaattcttaaccatgttttttttttttaaataattactgacatttgtactttaagctgtatacaaatgttcatatttgacagatattctaagcattagagatatttaatgaaaacttgtaaataggcaaaacgacatttaaaaagactgcccctgtctttgtgaaagcagcaaatagttctcttggctcccatttccccctctccactctaaaatatttttaaataaaatagcgtttgaaattctccagagaatgctttaaagagaaagatccacgtgacctcattaagtcattcattcacgtattcatttatcacacatttatcaggctcccaatatgtgccactttctctgtgttaaatactatggattcaaaaacaaaggaggccgggcgcagtggctcatgcctgtaatcctagttctttgggaggctgaggcgcgtggatcacctgaggtcaggagtttgagaccatcctggccaacatggcgaaaccctgtctctattaaaaatacaaaaattagccgggcgtggtggtgcgcgcctgtagtcccagctactcgggaggctgaggcaggagaatcacttgaaccccaggaggtggaggttgcagtgagccgagatcacgccactgcactccagcctgggcgacagagcgagactccgactcaaaaacaaaacaaaaacaaaggagaccccaacattggtcgtgagaagtttaccaaccaggaggggagataagtgtgtaaacaagcaaacaactgtcgtaaaggctgtggcacaagagtgggtgggtagaattcgggtaatccaggaggtgtcagaaagaccaggggtggacctttcatctgagccacgaggacaagcaggtgtttgctttggagacagagggtggacaggatgttctggagagctgcagttgcggggcagaggcagtgaggcatgaagcacctggcgcatggcctgtgcgggcctgggtggtgagggcaaagacagtgagcagaggaggcagcgcctggggggcctggccagggaccccaccccctgcatcctgatgaagaactgtaagaggaccatgtctgtgtgcctggataatcgctggcagcagcaagggaatttcgaagcaagatctcagctggagacaggcaagaggctgtcgccatgcttttaaagaagtatcagagatattttgcttttgaaacatttggcttcactggaactttcgtcttcctatgaaatattggaggatgtcagatcctcccccatttctaagagtaggagagactcatgtatctttctctttggggtaaacattcagcttcagatcctgcaggtagcagagagagagagagagagagagaggagtggttaagagtgtggccattggagtccagggagtctgcgttctaattctggctctcctcttaaatagtcctgcagcttgggcaacttactcaactgtgtccttcctcaacttccacatctgtaaaatggggagaacaccttcctttcagggttataggcaaatgaggtaataatctcttttaaaatacttagcccaagtaaatgctcagtaggtgctagctatcatctccagtttctatttcctgaactgtgaccttgactaaatgtggcccagtcctttaagagaggggatttgtggtcactttaaaaaaatcttcagctgtgctcatgtggtccggagtactgtgttagttttcctgcctgtggctcatgggccagtggtcaccatggaaatggtggtggtgggggtaggggtgggggaagagaaggaagccgagctacagagacattcatacacttgttcgtgaccacagcaggatttggggtccttctagagtcactgctgcaggattctttttgtttttttcttttttagaggtggggccttgctctgtcaccctggctagagtgctgtgaaacgatcacagtccactgtaaccttgaacaccaactgcaggattcctattctcttttgtgggcaagatagggtgggggacattgtgcacccccttcttctctgtcccagtctgtgacagaccctgtcagacattgagaggcctgagagctgcaacagtggttgtgccagagaggaatttgccaaagctctcagcgacctttctgcattaaagtttcgtgccattatctctttcacatacaaattcaagcccttttttttcccttgaaatcacttttgtgctgtttaacctctttaccccgatttcccccccttctttcttgctccctttctagtagtttccagctaatggatcacctggataagattgcccctgtctttgtgagagcagcaattagctctcaccctgagaaggcggcgtgttctgttgcttggcagccttggtgtagaggatggattgggtctgcgtcttttcatttgaaagtaggttatcgattagcacggatgccaatttactacagaggctgttgccaatgcctcttgatctcattatggtgtaaattttcaagattgtatcacattagctcaggagaattcaggagagaaaaacgtagtaaagttaaaaaaaaaaaagccaaaaaaaaaaattcttccattatattatagcccaggcaaaaataaacatggctacagctggccatgttcggaaaggacctgcggtgtgtgtgtggctgggttggttatgagctgtaggaaaacctagcgacaggtttcaaagtacttcatgtttttggtttattccttcgatttcttttaggactgattttcttgggaaatggtgatttttagggaaactgcagactgttgggtctatttttttatgacaagagccctctagtctcagctttgtgagacagaaaaaggaggcagggacagtgagatggcagaggaggagatgctggcgaccgtgctaatgctagctaatgctaattttgaggaccagatagtttgggtgcaggcctaactgttgttcagttaggaatctgagatcattcccttccaaaaagtggctttattgagatacaatttatgtgccataaaattcacctgttttaaacgtgtgcgggcctaactcttggccaattaggaatctgagatcattcttctataaaaaatggctttattgagacaatttatgtgccatgaaattcacttgttttaaatgtccagctcggtgcatttccatttattgccaggtctgcagccatcatcactatctaattttagaacatttctgtcactccacaaggaaatggcccattatcagtcagtcttcaccctactccactcccaggcacaggaaaagactaatctgctttccgtctctgtagattttccttttgtagcattttacatgaacaaagtcatacaatctgaggccttttgcagatggcttctttgagttggtacagtgttttcaaggctcaccctgttgtagcatgtatcagtacttcatttctctttattgcctggtaatattccactgtataaacataccacatgctgtatatccattcaccagtcgatggctatgtgggctatttctagtttttggctattatgaataatgctgttatgaacatttgtgtgtcaatttgtgtggacatatggtttcatttcttatggatagatgcctaggtgtggaattggtagttgatatggcaattctatgtttaacattttgagaaacttttttttttgaaatagagtctcactctgtcgcccaggctggagtgcagtggcgccatctcggctcactgcaacctccacctcctgggttcaagtgattctcctgccccagcctcccgagtagctgggattacaggcacgtgccaccatgcctggctaattttttgtatttttagtagagacagggtttcaccgtgttagccaggatggtcttgaacctctgaccctcgtgatccacccgcctcggcctcccaaagtactgggattataggcgtgagccaccacgcccggccccattgagaaacttccaaactcttttcccaaatggcagcaccattttatattcctcccagcaacagatgaggctttcgatgctagtatcaccctgtagctttgatttgcatttcactaatgaccgatgaggtatagcatcttttcgtgcttattgaccattcatatattttctttggaaaaaacatttattcaaccttttggtgttttttaattgggctatttttgttgttgttattgagttgtaagtctttaatatatcctggggtataagtctcttatcagatatatgattggccagtattttctcctggtctgtgagttatcttttcactttcttgatggtgttgtttgaagcacaatagttttctgtttgatgagatccagttgatcaatttttcttttattgcttttggtatctaagaagttgtctaatccaagatcatgaagatttacttccagatttttgtcttaagagtttatagttctggttccaacacttaggtctatggtccatttcgagttaagatcactcatttttcttgcataaagaaattttccagactcattcaggtttcaagaaaatagacttagaatgaccactgtggattttcttttctgtccttcattttctaacaaagcatatgtagtggccgtcacatgctgggtagaatcaagattgcaaagactgacgtaagaatttggcacatgagcaagctggagttggagatcctgacagaatctctaacacatcttctgagggtgggagaactgtcacagaagcaacctgcaggtgtgagatggactccagggccttggcactcatcagaagaaagcttgacctcctcacctgcatggggttggggaacaaagcaaattaagcatcagagaaagacctggcggtatgacacgattaagccataatggcaccagggcacagctgccaagcaggttgtcagaagggcagacagagtgatggagttttttgttggggtactgtcatatagttatttgatgaagccatctctctgtttttgactacattcttgctttcattggattttttcctacatcttgacccctaacctcctgcaacaggtatgggtgggagttgttgtttttttttttttttttttgagctttcttaagtatacctgtggttttcctccaagtcccccaaggatcagttatagctctgggaaagtggggggaagtgagatgctagacttatttttaccaaaatccaagactagtgacacaaggtagaagtcactggatggaatgaacttgtaggatattcccttttggggcactaatcacaaaggcaaattgaatggtagagtgtcaaggtgaactttaatactttgtaacatgagctccaggccaggtcttaaaacatcttggacatattgcaagaaatagctcagccctatagcacattgaatgagaatggagagtggatcctgggttggctttagactctggccttggcgtttgtgtgtacacatgtgcgtcgtcatctgtgcacacaggtacacaaatgtgtctttataatctctggggaagcaggttcacttttaatgttctttcatctgctatttgattttaaaatcttgggggaaagtattgaaaatcaaatgtactcatctgtcctgtgtaaaaataggagtcaaaattttaaaatctgaatttatgcaacaaattaaatatggagtgttacttctcatcacaaaataatctagccattgttaccttcaagagagcagtttctcattgatgcaattaaaatgaacttctcagggattcttttactataaacggaggtgcacccaaaccttatatctctgagaaaacagtggctgtgtaatgagtggtgaattgtttttggcgagtgtggctgccaggttgcttcctcctaaatctgagatggtagacagaggtttattattgctgtagcagatagagagcgtcttgcttgcactgcagaagtctgcccagagcacttaattagacatttctgtggctatttgcagcccagtacaatgggagatcaggggattccagattggaatcctagacatccaaatccatagttagcgttcagagccaaattttttattgcttctctgggattatgctaatcattcaattcaaatttattcaactcacatttttgacattctgctgtgtgctaaggtggtggaaatactttttttttttttttagacagagtcttgctctgtcgcctaggctggagtgcagtggtgcaatcttggttcactgcagcctctgccccccgggttccagcgattctcctgcctcagcctcccgggtagctgggattacaggcacccgccaccacacctggctagtttttgtatttttagtagagatggggtttcgccatgttggccaggctggtctcgaactcctgacctcaggtaatcaggtggcggagatacttaatgaaacctggttccaaccttcaagaatagcacaaggaagggaggggggtctggataaaatcgaaaggtacaagttgtgttgggactaagtggatctaaacatgctttctgaggctgtcattaccccaaaagtcagctttgtgtcaatcaacaaacactgtggtctgtcttttctctcagcaaagtctgaaggagtgggacactccaactgtgtgtcacaggaatgagctgtcatctggcaatttacagaccagcttcaaggattccatttaccaccagtttattcacttgtatttctaatatttatattttcttaagatgatcccctctcccatgtgtgctaattttctaaataacagccacatcgacaaaatgccccctttgatgagtcatgggctgagctgggttctagtgatgctggctacaaccttgagagttaaagaaaagctatttatattttctttttattattttattttattttattttattttgagacagagtctcactctgtcgcccaagctggagtgcggtggcgtgatctcagctcactgcaacctccgcctcccggattcaagcaattctcctgcctcagcctcctgagtagctgggattacaggtgcccgccaccacgtccagctaatttttgtatttttagtagagacggggtttcaccatgttggtcaggctggtctcgaaccccttacctcgtgatccacccaccttggtctcccaaagtgctgggattacaggcgtgggccactgcgcctggccctatattttcttaagatggtcccttctcccacgtgcgctaattttccaaataacagccacatcaacagaatgcccccttcgatgagtcatgggccgagctgggttctagtgatgccggctacagcctcgacagttaaggaaaagccactttcgcaaagaatggaccctgcttccgtaaccttgggttaaatgttgtctgcgagcaccttactgagtttcttcattttttgctttatttgggtgcagctaaaccagctaaacagccttaataagttactccctgggatacaataagctccctgcatctgtgaggtgaaaggcagcccagtgaattctgtcgacagtagctgttctgagaaagtgagcttgaaagggggtgtaggagtcaaaggtgagaggtcatgacgtcagtagtccaaacacctggaggttttagtctaacttcctttcttgttacttagccaggcagtaagttacgtatctctaacttggccttctgtaaagtgggactcttagtacttgccctgcttatctttcagacagaatcaaatgaaatagcagaagtgttttgtcaattaaagtgacatcagatgcaaagagtattattatatcatcatcatcatcatcaccaaaggaactatggtaatgttggataaaaagccaaatacttttttttttctttctttctttctttttttttctgagacagagtctctctctgtagcccaggctggagtgcaatggcgcgatcttggctcactgcaacttccacctcctggattcaagtgattctcctgcctcagcttccagagtagctgggactacaggcgcgcaccaccacgctcagctaatttttgtatttttagtagagacagggtttcaccatgttggccaggatggtctcgatctcttgacctcatgatctgtccgccttggactcccaaagtgccgggattacaggtgtgagccactgcactcagccaagccaggtacttttctaagtaatttaattctctagaagaaaagatgataagatctttgcctggaactggaggccattatcttaagtggaacaagtcagacacaaaaagacaaatactgcgtgttctcacttataagtgggagctaaataatgtgtacacatggacaatagagaaagacagacagtggagattgcaaagatggggcaggttgatgaggaatgagaaattactgaatggacaccatgtagtttattccagtgatggatgcattcaaagctcagacttcaccaatatggaatatgtccatgtaacaaaattacacttggaccccatacatttatacaaaaaaagacctttgacactaggcataactagtggtttggttaatgcagaggagtattgctgtggtcgctttcttttaaccagcttgagagacagtacaagagaaggttcaggttcttgtcttgacagaagtctcagtacacccacctgtactttaggagaatgtggattggaaggctcttggtgtttcagttttctgagtgggtttgagtaattatgttggagagggggaggttgatgagagtgtaacacacttttcgtggctataagagatgataataaagagttattagaacatttattagacacatgatagggaaagttggttaagggccttgaagaacaggcaaaggatgtggaattcatgtttttgagctctagatgatatgatgaaaattgtggttgaggattatttttctgatcttgaggaaattcaagtttgaatgatgaggatgaatgaggttaatcaacactgaaattggaatcagaggcaaattcaaggccgggcgcggtggctcatgcctgtaatcccagcactttgggaggccgaggtgggcgaatcacctgaggtcaggaattcgagacctgcttagccgacatggcaaaaccccatctctactaaaaatacaaaaattagccaggtgtggtggcacacgcttgtaatcccagctacttgggaggctaaggcaggagaatcacttgatcccaggaggtggaggttgcagtgagcctggatcgcaccattgcactccagtctgggcaagaagagtgaaactccatctccaaaaaaaaaaaaaaaaaaaaagaggcaaattcaagacacagtagaacaggggtgtggtcggtgaagccgggagagtaggcaggaagtgaggccagtttgggaaccagcaaagcccacctctctctcgaatagcccctatttgtcccaagatcttactttcctaccatcatgtttggttttgactgaatagctcaattcagagagacatttcaactttccctctgtgctttgcaaactgatgacgaagatatgttttaaggaactagctcccaagttagttcctcttacaaagatgtacagattttaaaactgaacatgtgtgtgttgctgctgagaatgtaaaatcatgcagctgctttggaaaatgatacgacagtttttcaaaaaattaaacaaggaattacatatgattcagcagttccacttctggtataaacccagttgaattgaaagcagggactcaaacaaatatctgtacacccatgttcgtagcaacattattcacagtagccaaaaggtgggaacagcccagtgtccatcatggatggatgagcaaaatgtggtctatgtatttacaatggaatattgttcagaaaaggagtgaaattctgaaacaggctacaacatggatgaaccttggagacatgatgccaagtgaaataagccagtcacaaaggacaaatgttgtatggctttgcttacacgaggtacataaagtaatcagactcagacaggaagtagaatggtggttgtcaggggctggagttgaggggaatggagagttattgtttaacatacagagtttcaattcgggaagatgaaaaagttctggagatgatggtggtgatggttgcgtagcaatgtgaacgtactgaatgccactgcacacttgaaagtggctaatatagtcaagtttacatgtattttaccataataaaaatggtgaactgtcattatcttgcattgttgatgcttttgttcaaatcctgggaaatatgatataataaatctcttcttatgttattccaggtctggaaagtgaactctggttaacttttcaatatcattttccccaggaaaacaaaagataatgatgtttcctaggccaaacacaccttgttaacatttccataacaaaacagcaaactgtcatttaaagtttatctcactgttattcttgagccacaaagaagcaatgtttacagacgattttacactaacaattggatgtgctggaaatgggtatttgggtgatctcagggttcgtgaacctcaggctgtggagtgttcttgttctagatgtccgctgagagttttctttctcaaggggctcctaaattagaggtaagccccctaccacctgtgtgatcccccagaagttagaaccttgcgccttctctgtggcagggaggagacctgtcctctctagagctggaaggttgtgtgttaacaaagttgaaggcagtcatattagtctgttttcactttgctgataaagacacacatgagactgggtaatttataaagacaaagaggtttaatggactcacagttccatgtggctggggaggcctcacaatcatggtggaaggtgaaagtcacgtcttacatggtggcagacaagagagaaagagagtgaagtgaaagaggagaactcctatgagaccatcagatctcgtgagacttactcactaccgtgagaacagtatggggggaaaccacccccgtgattcaattatctcctccccggtccctcccacaacacgtgggaattatgggagctacaattcaagatgaaattaacctatgaaaccatcagatctcgtgagacttactaccatgagaacagtatggggaaactgcccccatgattcagtcatctccccctgggtccctcccacagcatgtgggaattaagggagctacaattcacgatgaaatttgggaggggacacagccagaccatatcagcagcctatgggatgttcccccgagggctccacagccgggtgctcagattgctgggactctcttgtcaggacttcttccttcttttttgcctaggtcttatcagaactaagccatttggtttgtaatctttcctgtaacactggctgcagggtctttagcctggattctagattggagggtacagggcagcagcctcacaggtgcccattagcacatcccacaagcagtcacggcactgcacttgcactggaaacagcttctcattttcccgggagtaccttctgccaactttgagaacaccaattcctaattcctgttccagtatccactttggttttatacataggacatcttttcctataagttttccctgaatgttttgttttgtttttttttttttttacatttcttacagatgtctattaaaatctcagcattcttataaaatactctttgatttgaagaaagtagtcattttcccttaggcttatgatgcctcagtctccctataagagataagaaccaggctgggcgtggtggctcatgcctataatcccagcactttgggaagccaaggtgggtggatcacctgaggtcaggagttcgagaccagcctgaccaagatggtgaaacaccatctctactaaaaatacaaaaattagccggtgtggtggcaggtgcctgtagtcccagctactcgggaggctgaggctggagaatcgcttgaacctgggaggcggaggttgcaatgagccaagatcgtgccactgcactctagcctgggtgacaagagcaagactctgtctcaaaaaaaaaaaaaaaaaaaaaaaaaaaagagataagaaccagatatgcataaatatgaatatttgttcatttgtaatctggctcttcctgtgataagatgccaccaatatttgggtagaatgctggggagaagttacctcccaacattgaaaagagtaaaatcccagcactttgggaggccgaggcgggcggattacctgaggtcaggagttcgagaccagcctggccaacatggtgaaaccccatctctactaaaaatccaaaacttagctgggcgtgatggcagacgcctgtaatcccagctactcgggaggctgaggcaggagaatcatttaaacccaggagacagagggtgcagtgagccgagatcacaccactacacacccacctgggcaataagagtgaaactcttgtctcaaaacaagcaaacaaaaaggattaaatatatataaaaaaatctagaaggaaatatatggataaagaagtttctaagcttgatagaatagaaggtatcacaagagaaaatatagacaggtttgactacataaaaattaaactctgtatatcagaaaacatttgtacgttgacaaaatcaaagggcaggcgacaatctgcagagaatgtaaaaaattacaacgaagcatgaatatctttaatatagaatttttaatacaaattgctaatgtcaacattaagaccgcagtagtttaagggacaaaggcagttgaactgactttgcaaaaggggaaacaaacacacatggctaccaaacgcaagaaaaattgttcaacttcattagtaatcaaataaatgcaaatcgaaacaacagtaagctaccatttttgatgcagcttaacaaagattttgtaaaatgtgatattctttcatataatgaaggataaattaataccattttggaaagcagtgtgatgaaccttaaaattattcttactccttgacctggtagttctatttctgggaatctatcttaaggggataatcctaactaccaggattaatgcacaaaagtatttcctgaagcatttaaaaaaaataattataaagaattagaaagaagctgcatgttcagcattagggaaatggttacagaaattatgatcaatctatttgatcaaatgctgtgtggtctcttaaaataacatttgtaaaatgtttcccatgtttcaggggacgtgctcatgatataattaatgctaagtgataaaaaagcaggatataacctcaaatgtaagtattttctggtctagacagtttaaaacttcacaggaaagaaaaaaaaggatgcttgctacaatattagcagagaataatattgatggctgctggtctcccctagtaaactgtgtttcctaaaagggcatacattactttaaaaacatttttaattttgagatattttgtaaaaatttgattctcatatatctgtcttaagaatttattatataaatcatccttgaataaactaagttacatagttttcaaactctgtctcctgctaaatgatcatctatactgatgactttttaaaataatataaacttccaggagggaggaaagaggtatgtttattttaggggcctccagagcccacagtaactcttccttcttggggagaggagtctaaagataacaggcctgagtttgtgaactctcatctctagtatacttgacttcttctatgtatttattgattgtgtggtatcacagatttggggggtgcgtgtgcaggtgcacgtgtcccgttctgtagtggtggggattgggtttctagtgtacccatcacctcaatagtgaacattacacccaacagataatttttttttacttttagtctcagggcactgtgcaggtttgtgatacaggtaagttgtgtgtcatgggatttgctgtacagatgatttcatcacctaggtagtaagcatagtacccaataggtagtttttgagactcacccttctcttaccctccaccctcaaagtaggtcttggtgtctgttgttcccctcctagtatccatgtgtgctcattgtttagctcccacttataattgagaacacacggtatttggttttctgttcctgtgttagtttgcttaggatgatggcctccagccccatccatgttgctgcaaaagacatgatcttggctgcatagtgttccatggtgtatatgagccacattttctttatccagtctactgttgattggcatctagcttgattccatgtttgcactattgtgaatagtgctgcagtgaacatacgtgtgcatatgcctttatggtagaatgatttatgttcctttggtacttgacttcttattgccattgtgttcaccaaagacaatcatatgactcagtctgtttcaattggtttgaaagcttaggctttcctttttaaataaaccggaaagcttaggctttcctttttaaataaccttttttcaaaatttcatatttttttctcattttaggaatgtaataatagtcatcatgcgttaagagctttcaaagaaccagatcctgttctaaacactttatatgtgttacatcatttaatgttcacagcaatcctctgagatgtaggtactgttatcatcccagttttacagatgagaaaactgaagcacagagaagtcaagtaagtggagaagcccatgttcaaacctgagtcatctgtcgccagagcgtccctccactgcgccagatttatgacaacttacttgttctttatgaaggcagcaactcaggcacagtaggccaaggctgccatctgatgaaacaactggcaaatcaatggcagagaaagattcagagcagagacagggctgcgtccattgatcgtgttaggacctggaccatggggcgctagaaaatgacatggacgccagaaagtttctttttgctgctgactgatcatttatgaactttccatggacttttgaaaataatatcaaaataataccactagaattgttaaagcattccacgtaggacactgggtcatttgatttctgtaggaaaatgtgattttgtaggaaggcgtatggtagtttcttccatataaggccattatctcgtctttgaacctaatttctactgcagttcaggtttggagaggcctaattcatcgtggtggcacagttttaaaatttgcccctcatttggaattgatttagagtttccgtttacatagagtgcttgatgcaggaggcagttatggaaagggaggccctctctgagcacggtgcatggggttagagttgcctagattttggtaacatagtgacactgcaaacaaaactctatggaaacaaaataattttttttttctttttggacacagagtcttcctcatgcagcggtgcaaactcggctcactgcaaccccttgggttcaagcgattgtcctgcctcaggcccccaagtagctgggactacaggcatgtgccaccatgcctggctagttttttgtatttttagtagagatggggttttgccatgttgcccaggctggtctcgaacatctgacctcaggccatccacccaccttggcctcccaaagtgctgggattacaggtgcgagccactgcacctggcctggtttttactttcaaatctgatattttagcctgttagtgttaaccatgtttaactgactcaaatgaaatgctggccctggctcccatatagccagaagaataagaatgctggtaatcaggtattggcgtttcttcaaaaagccaaaatctgttgtaatagaaatactggtaatttcttcactctgtgaagtacatgtgtatgggggtgtgtgtgtgtaggagagggttgaagattttaacagttgtttgcccaaggttactatataatctaaacatatataaggctccaaggcatttagcttatggggaaaattaaatagtggctattttataaaggcaactagttgggaggcctcaatcattgttactttttatgggctctactaggattttatgtaggaaccagtgtgatctggggaggagggattcctttacacacatccttcagaaagccaccattgtattcctgttgcatttgatgaatatccctagtaggtttcttttctccacctgccacctaggtagatcaccactgctgcatgtcacttttactgaagtgagtaaaatctctgctagtagtgttttccaattatgcatatattttcttagtgcttatttggcactgactttggggagtcgtagtctttctgagatgggaataacatcatttgtttgttgcgcctcagttccaccgtcatttaaataggaggcgtgtcgtgatggtgggcaaccttgttcccacctgaccttgtgagatgcgctaggtggattatggtctttgaactacacattgcttgaattccttgggagacgtgggtcacataaacaggagcctgtgatttttcaggattgacggggaggggcatcttcctttcctaaatccttcctttgatctcctcagcggaggtcacttaagcaacagctggctcttctttgcccctggggctccgcttcagggccgggggaaggaggctgagcatgtcgagtgccctgggaaggcccatctgcctgtcaggtgttgtttttccgccaaacaccgaaagagctatgttttgttcctcttaaagagtttaccatccagaagggaaaaataagatagaaagtaaatagctacagcacacagtacctctgaggataggggtaataggattgtggtcaaagcagggtgtgctcggaaccatttgaggcgaccggcaatcatttccttaaaagagtagccttgagaaaagctctaatagatgggtaagattttgatgggattttggtaggagccaaggagagtaatcaaagtggaaaaaggagggactggagcccttgcctggggcttgaggttatcctcgaggtccttcaggatgtccttctgtggcaggaggatgatagaactatttgtttctagtgttttgtatggttttagagccttatatattatggtgacagatccaaggacacaatgatttgatggtgtccctgtaggaagaccccgtttaacaagaccactattttcctggtaaatgagatataagatgtatagtcttttgtttcctcccagcagctactctgtggatacatcctgtgaacttccctttgcaatgattaggatgacagcccctgtctctaagcttctacctgggctccctaagtccattttcttcccattcctaatagctctgaaaacaaccttccactgtgtttcctccagcatatttccgagttgattgtcaagcacagctcttatgatatcactgatctgctcaaagcccttccctggctctcctgttgaatggtgacctgggtgtaaatgcctcagacctctcggtctcctcccacctttccaagccatatccccttcattgactgtgctccaggcaccacctccagagtagacctggggtgggcctcagaactcgcatttctaacgggtttccaggtgatttccgagaaccactgccatagccaagccagacaggtgtggcttaacggacctcagaattctcccttggatatttttttaagtgcatcttccttcactttgattactctccttggctcctaccaaaatcccatcaaaatcttacccatctattagagcttttctcaaggctactcttttaaggaaatgattgccggtcacctcaaatggttccgagcataccctgctttgaccacggtcctattacccctatcctcagaggtactgtgtgctgtagctatttattttctatcttatttttcccttctggatggtaaactctttaagaggaacaaaatatagctccttcggtgtttggcggaagaacaattttgagataagaaatcctactcctcattgattctgttccgcatttggagatgttggcaagtgcgtcgagccactcagagggcacggattagattttattcatattagaatcctctgcatcacccgaccaattatttgcccacagtaggcccatcataaatatttggtgattgaataacaaccttccacactcaagatgttgcaggcctgagaagtaagaagaaagcgctgcatagtcttcctgcttctattcttgtaatcctcttataaaccatgggccttctaggagaacaattattatttttaatgaactggtgtgtggcatagcttaaacctctttattatccttcagcacttagctttgaataggattaatcagccaggaagatctgaggaggggcagggcaggcttcgttcccaggttattgcttttccagtgaaaagcactttgaagaggacagtggagactgatcttttattttaattcaatataattataactttgttttttttacacacatcacacacacacgtgctcacacacttcagaagtctcatggctaacgatggggctgtgtaagttattcattaggaagatttgagaagcagggtcaagcaatggagaaaaggtatatatttttgaggatttatttttagtatttgatataaaaatgtatgagtaatacatgctgattataaagaatgaaaataggacagaagaagatagagtcaaaagttaaagtgcccccggggaagtgtatttatataaagtgacacaggagatattttgaaattttaatgcccaaaagtaaagtaaatgatgttcaccatatagacgacaactaggcacagtttcaccacccaggataattaatgtgtgatttttctggtgtcctcaaaattattagcactcccatgcgtactggagtttcacagatggatttcactttcacatttgagcatttctcagtggtttccagcctcagctctctcttaagcagatgactttagccaagctgagggcagaaaaagctaaggaatgagatcctgtcttgtctcttcctcccctgctccctcccttcctcctaccacccacacatccttcccttttgcagcagatactcgttgagggcttactatgctgcctcactgaggcattgtgccaggtgtcaggaatacagtggtgagcaaaacagacctccagtacttgtgttttgggagattcaaatcaggataccagagtccatgcagtctctggagcagacagcctgagttcaaattccagatcagtacttactatgctatgtgccctcagacaagttacttgtgtctctggcctcaatttcctcatctgtaaaatgggaatgataaaagcatctacctcaaagttatttaatatagggattaaaataaataaagatgtaaagtgattaaaacagagtgtaatatttggtaagtgcttggctgggtgcggtggctcacgcctgtaatcccagcactttggggggccaaggtgggaggatcacctgaggtcaggagtgcaagaccagcctggccaacatggcaaaaccccgtctctactaaaactacaaaaattagctgggcatggtggtgggggcctgtaattccggctagttgggaggctgaggcaggagaatcgcttgaacttgggaggcggaggttgcgtgagtcgagatcgaggtcgcaccattgcactttagcctgggcaatagagagagactccgtctcaaaaaaaaaaaaaaattgtgagtgctcagtaaatgttgttatttacagtcagggtgtgggcagacatttaacaaataataataaataactaggaagttctaactgagataaaggaaagatgatgctctggagagtgtaacgggggttctaatgtagaccggggggtcaggaaggcgtggtgtgcagctggtggtggaaaggaagcccctgcggcagcgtcgggggaggcgggagagtgtggccgctgagctgagctgagctgaggctggagtcccaagcaggggacagactaggtggggcctcagggcatctaagttcacttcattcattttacagatgaagaaactaaggtccagaaagataattgctttgtccagatcacaggctggtgacagagctaaggcaagacgcaggtctccttactcctggtgcactggtgaggaaaccttttaacctcaaactttcatcattttctgtctctatcagatgcaaatctaaatgtccttacacttgttcctggtagggtgccctcgtaccaacagagggcaaatacacgcaagtgtgcacatatatactcccctccctcctccctccctcctcccttcttgagggtggtggtgctcagggtgtatgttggatggtagtgcgtagttgattaggggagaattcaggttgcttctttgtttccagttttaaataatctgacccatgtgtctctttattcatccatcatacctgttcatatatccacatatctttggtttttttttttttgagatggcctctctgttgcccaggctggagtgcagtggtgtaatcttggctcactgcaacctccgcctcccaggttcaagtgattcttctgcctcagcctcccaagcagctgtgattacaggcatgcgccaccatgcccggccaattcctttggtatgtttaaatagagatggggtttcaccatgttggccaggcttggtcgcaaactcctggccttaagaaatctgtctgcttcagcctcccaaagtgctgggattacaggagtgagccactgtgcctggcccatgtatccacatatctactcatccatctgtccatccatccatccatccatccatccatccacccatccacttgttcattgatttattcatgcaatccacaaatatttattgaagggcagatatgtgtcacaaatttgtgttaggtatttttgatggtcagccaaacaaacccggcctctgccctcatgcagtttacagtctgtcagcagcaaatcgaaaggaacatatcctgtgtctacacttccgtgctatcattgtgcgatgggattttaaaaaattcacgagattgttctaacacccacaaggaatgcacactctcgttaatcccacacgactatttctttagtggcttatttgtgtttaatttccaagataggggcggtgatattcccaaatcccatttctctcctaaatctcgttttcacagatgctcagcaaaggatgtagggcgactactgcagcagcacacagcattcaaccaggagtggaatttcatgaactgctctttatttcccttctggtctcttgagtctggttcatcttgtctagagctctgataatctccgagacaaaatatttaaatcttctgcagctctagggactttgaggaaggaatattgtggctaaaatcctaaatattttggaatatcattaatgcaagggttatacagcagatgctgtctggcacaatctccatcccaagagaatgtgtcaatatctttgtatatggaaatgtacatgtatactcataaatttctccagcctcccaattctgtatctctttcccctttgagactgacttttacttcccttctttagcccctgcttactttaatatacattttttctctctgttttcagaaaggggtaaaaaattgttaccataaatgattgatagaggcctgaatttttattgttatctcttccggagtggaaacctgccttttcatagagaacgcagctttaatccaaaggatggactatctaattgttgaatttcaaatataggcagggctgattgagggtatagggtttttcaaacgttcttaaaatcacaatgtatgagtaaaggcataatactgatgggaccacagtacaggacgttttccaaagggcgtgaaagtcattgtgtgacccctgttgatgcctctttattcttgttttgtagaaaaagtaactgatttcttaaaaagcatattaagcccacaccctgtgcccagtatttctttagaacaaccctaaaaaggagacaggattatcttcactttacacccaagacagctgaagacgacagcagctaagaggcttgctcaaggccacacagttaagaattagagttgagcctcagagctggctcttgggtctggaccacctccctgggttaaatacagtcctgtctcagtacacacactgcctcgcctcctgatttttaaggtattacaagttaaacacgcaacaaatagtctagatcagtttcattttgaaataacatagcagttataatgtggatgatattatgcttgaaataaaataatcctgatcatggagcaagcacagtgacctgccttaacagttagatgttagtagagaggacacagagatcatttaaatgctagtaagggcttgtgactgcgttctgaatgcttagtatttttagattcctccaatcgcttctaaccttcagccctgccatggttttttctgtgaccactggaattctaaattcagaaaggttgttagccacctggataattgcacctttgtaacttttaagacaacaacctagaggcagaggataactacaataaatgacttgtaatttcaggtcttagatctctgctttcacataaaaccagctttccacttccttaggttcaccacctgaagaaatcaaagctaagcattaccagaagtcattatctactatttaaagcctgttctaagcgggagacaagccccctttttaggaggcgtgggggcggggggaaggggatccatttctcattttgccatgtttctgcaggaatgtttttaatagggatcctttttacccccagctactctgcagcacaggagtacgactgtatttgaggaggcagcttgacttcatgctccagggagaagtcttttatttcctgttggggttttaaagttgcccttgcttaggtcgttgctgttttataagtcagcctgaatatttaaaggcaggaggcctgttggtctatgttatgttggccttggggcattagaatgacagagcagctttatttaggattgcgaggcaggccatatgtactcaattatcccattttcgaggacttggccatttgtaccacatctccctgcaagccctttcatgagagccactattattattcacattcagtaagacctgagaaatattattagccaggaaagctctcatttacctcgccatctctcgcaacgttactcactgccctcactgcagagcactccttgtgtaccctctaccttaactaagtttgtcccaagaaaatgatgagaaattcttttacgctggcatacacagactaatcaggtttagtgggaagagcgtggcctctcaagtgtggcagatctaggttcacatcctgatctaccggtctgagcttggaaaacattacttcatttttctgaacctcagtttctctgtttgaaaatgggttgaagtggccgggcgcagtggctcacgcctataatcccagcactttggggggccaaggcgggaggattctttgaggccaggagttcgagaccaacctggccaacatggtgaaaccgcgtctttactaaaaatacaaaaaattagccggacgtggtggcgggcgcctgtagtcccagctactcaggaggctgaggcaggagaatgccgtgaacccgggaggcggagcttgcagtgagctgagatcgcgctgctgcactccagcctgggtgacagagcgagactccatctcaaaaaaaaaaaaaaaaaaaaatacacacaaaaacagccgggcatggtggcgcatacctataaccccagctactcaggaggctgaggcatgagaatcacttgcacccaggaggcagaggttgcagtgagccgagatcccactactgcactccagcctgggtgactagagcaagactctgtctcaaaaaaaacaaaacaaaacaaaaacaaaaaaggccgggcgcggtggctcatgcctgtaatcccagcactttgggaggccgaggagggtggatcatgaggtcaggagtttgagaccagcctggacaacatttttagtctctactaaaaatacaaaaattagccaggcatggtggtgtgcgcctatagtcccatctacttgggaggctgaggcaggagaatagcttgaacctgggaggcagaggtttcagtgagccgagactgtgtcattgcactccagcctgggtgacagagcgcgactctgtctcaaaaaaaaaaaaagaaaatgagttaaagttacaaggaagctgattttggcatccataagaaaaatgggcacaacgatcgttgctttttgcgtggattgccacaagaatgtttttggattcacagatgtttaatactacacatcactttctccttctcctacttttcccataggttttcattcaacagatatctgttgattatcttgtggtgtttcaagatgtgtccatctgcattttagctgggcatatgcccaaacagcatagatttcaagctgtcacaacccaccatgggacagatacttcttaaagtgtgtgtgggttgcgttactgggacccccaattgccacaccgctagcatttgtccacttgtaaagattttcttacttgtcttccttgttgaatcaggaagtggacttttacatggtgcatgcagtttttgatgcgcttcctctccctgctccctggaggtgccgcatgaaagcgcttttccctggacgttcagttccctctccactccttgtctctgtgcatcctgcatcttggcatctccccccgtgacatttattcctgtgaatctgaaaacttcctgtatgttttgtggctacattcgtattccagttgctagagcagaggggagcgggtgctgccacgtgaactttggtgttgaaagagcttcaggataaagttttcagaggacctgctatcaaccaaagctacttgaatataattaggaactaggtccagttcctaatcatactccagaggaggataaatccataggctgtccccaagccagttagctctgagtcagcaatgagcttacatcttcacacgcagatgctgtaggtttacttcatatgtccttctgcagtcattgtcctgcacggctcaggtggcagtgacatactggctagggacatggagaggagctctcacaagggatctggaaggtacatcaggcctaggagagaggaacaaatgaaaacggcactggggcttcatggatggtaataattcatacaggagactttccagttagagcactaagtatcaacactatttggagcatcactccaaactgtactcatttcaaactataatgaaatgcgtcttctctgttgtaagatctctctttttttttttttgagatggagtcttgctctgccacccaggctggcatgcagtggtgcgatctcggctcaccgcaacatccatctcccaggttcaagcaattctcctaccttagcctcctgagtagctgggattacaagcgcccgccaccatgcccagctaatttttgtatttttagtagaggcggggtttcgccatgttggccaggctggtctcgagctcctgacctcaggtgatccacctgccttggcctcctaaagtgctgggattacaggcgtgagccaccacgcctggctgttgtaaggatctcttaaatttctcttatggcttcgtctcaaccacagagcaaataatccccttaaaaatcttaagtttttagtttttccagggctttattttgtgtgattttttttttctttaagagatgaggtctcactctgtcacgcaggctggagtgcggtggcagaatcatagctcactgcagcgtcgaactcctcagctcaagtgatcctcccacctcagcctcccaagtagctgggacctcagatgcacaccaccattcctggctaatttttaacaatttctttttgtagaaatggagtcttgctatgttgcccaggctggtcttgaactcctgcctttgagtgatcttgctgccttggactcccaaagtgttgggatgactggagagagccactgtgctgggccttgtttcttaattgttcatttaacaggcctggttggggtgtgaaatggagtccatgtgtgtattttgcatcctctgtaaatatggccgtagagtacattctaaacacagcctttctgatccactggcttttgtgcataccagggtatgacatcgtgttaaaaagaccgttagtgtagtgtattgtttttgtaaatgcagtttattctaagcacactatatgctggaattatttctagagttcatagtggtattatcattaaggtgtatggaaagtatactaattcctattctataggcaaaaacaactggagcacagcaatactactgccttattgaatcttataagaatatagggggaataatacttgaagtgtacaataataataataatatgctcaaccagcaacactaattaccataagaaagatgtggttgagaactacatttccacaataattacacaattgctacactcacttggcaaccttatggtatggctggtatgctagcaaccaaatcttcctgtgtaaaactacttccatgatgttcctgccacaggatttcgtgctgggctgacagaacagaacagtttcctgaggaacgttttctttttctttcttttcttttctttttttttttttttagacatagggtctcgttctgttgcctaggctggagtgcagtggcaggattatggctcactgaacaccttctgggctcaagtgaccctcctgactcagcactctcccccacccccacccacacccccacccccaccaagtagctgggactacaggtgcccacatctggctaatttaaaaaacttttttttaaagagatggggtcttgttatgttgcccagggtggtctggaactcctggcctcaagcaatcctcccacctcaccctcccaaagtgcaggaattataggagtgagtcactgagcccagcccccaaggagacttttctgattgctggtctttgccatcctcagagaaccaggcggggcacccagggtccctctttgttgactcataccttgggttctcttatatttactcaaacataatgtcctgaagttatcagtagtcccttcttattctccagctccctgtaaaggcttaaagcataactctgggaaaatgttttgcttgggtgggcagaaatggtatatttgggtacagatgtgggatgtgaagcctcagctgtcactgcacctgcacccagagtggtccccacttcttccactctttgcatctgtcctgggcaccctcctttatctttgcacaaaggattaagcatttcatgtgatatgccttaaattgattttccttatgagtagggaaagggagtggggatagaagacaattgtttaatccaataatcatgcaagaatgtgttcttgacattaagagaacaactgtagtctgtggagtagcctaagacacagttgcacatagctatgcaggcagttattgatctgaagaatgaaccgtcatggctgctttgaggaataagatgcatcactattgaaggaggccgggagaatactggagagtggtctccaaccctggatcttgatgctgctgtttactgcagccatgcaaaggaatgtgtgcttcaggtctgagtgttcaaggcaggaccagcaaatttccatgaactctctgaccgtaggccacctctgttccattttgcttctttgctcctaaaaaaattaaatatcttaagttagtttataaaacattatactttaaacaggaagtgaaaatgtttttctgtttttaaaagtaatatatgccattgtagagaatgtggaaaatacagaaagattcagagatcacagaattaagaatccaaatgattttgaccagctggaatgatcaagtctgaattagcatgatgatatttaaatgggatgtgttttgctttgacgatttcggcttagggtcctcggagagagaagcctgtgtcccttaagcctagcaaggtacttggcagagaagggcagagtggggcattcctgaatgaacaaatggatgaataaatagaataggatgcatggaattaaggcaggactccctgtgttggaagcaaagctaggagtcacaaggagaacgagcactcaaaaaagagatttctcagcaaggcaaatttacttctgcagaagggtgcttctcacaggactggttgccacgagagcacaccgaacacaggagggaaagggtttttttcattcctaacgcagcttgtccttactgctgtgtcctgcctccattggctggagttggaccgcacaatctaaactgaacccgattggctaacttgaaagacaactttggcgggaagagctgccacagcaggaggggtaaattacagagtgagtagcagacgtgggctctgtagataaggacttacaagggacttacagtccggtgaagaactaaacagcaatggcatctaataaatacccaaggatgagcagttggtttcatcttcatactccctaaggaccggtgggagagttgtttactggacccggaagaaacatgatagaatttctggggcattcactttggaggaaaccatgggatggtctacattgaaggcctgaggaacttttccctcctccgtgctaagttggtagtttccactttccaccacccacttcccacagctccccccaaacacacgtacacatcgtttttcacaccatcatcctttttggtaaagagatgtgtccatttctgtcctgcattagtgagttccttaccaggtgcaaacactgttagatgtcctgaaaaatgtatctcataaaagagctgtagcaggagggagtatcagagaagagagtagctttccttttgctgtctggctgcaaaaccatctggaagcccccgcggaggtgggctgtgtgcccgagccctaccttggagagacacttggttcccttttccagcagatttcttttcctgacagataattctctgttaatcgagggctcctcaaatccgaatctgagcttcctcttctattctcacctctgtgccagggaaattttcttggcaattgaaaccaaagcgataggctggcagtgggactctacttggctgggggtaaaataagcaatgattgcacataattgcagaaaacaattttgaattttattaatgaggtgctccaaacaacatcttttagtccattgtcccacttaacagccaattcaccggagttcattgtgctgtaatttacatctatcttcccccattgataacaccaggcccttgtgttctgtaattgacacaagttggtcattttcaggggtgtttctctctctaaggacataaaataaacaggcttgctggcgagtgggattgagttagcctcatccacagagccaattggctgctgctgcttgacgctcattttccttcctcaggagaggtggcacagccgtgggtacgtgcacagaaagtcctcaggttaaagatgttgaggtggaggcctggggaggcaagcggatgtcgatagtgagaaaacgagacttctttgcctttcctttgcttcttgccacccaggacccaacatctccaggtggagctgatttttagtgtgcgcagccaggctttgggggcagtagaggtaagattcaggggagggtttccaggaggggatataggccaccacctccttcagcatctcatctcaaaatgtagcatgtgtgagtcgccactataggtcccagtgagctcagctagcccagctcctaccttctttgtgtgtttacagcaaaaacgctgtcactgctttcatgtgtctgtttaaacactgtgtggccatcggctctgtgttgggcacttagggagtatgaagatgaaaccaactgctcatccttgggtatttattagatgccattgctatttagttcttcgccagactgtaagtcccttgaggtcaaggatctcgtctcctctgttcttagtatcctctatagaaccgataacagagtggacacttagaaaaacattaacaggccaggcgcagtggctcacgcttgtaatcccagcacttttggaggctgagacgggtggatcatctgaggtcaggagtttgagaccagcctggctaacatggtgaaaccccatttctactaaaaatacaaaaaattagttgggcatggtggtgtacacctataatcccagctactcaggaggctgaggcaggagaatcgcttgaacccgggaggcggaggttgcagtgagctgagatcatgccactgcactccagcctggctgacagagtgagactacatctaaaaaaaataaaacaagaaaaaaaataaaaaaagaaaacattaacaaatggatgaatcaaatggagaagaagagacaagtacagaaacacgtgtagaagtggaaaagaaaaaacaaaaacataaagggagctctaaaaggttacagaaagagctgtgggacatagagagaggtgtttcttttccctggggtgagccgggaagccttcatggaaaggctggcctggagcatgagagattctcatcggtggacggtggaggttgagcatttcaggggtaaattccgagaacattgtacacacataagaaataatgcaaggtgcctatggctttgacttgagcatttggtatgtgcaaggaagtgactggagatcaaaagggaaatgcagattggaaacagggcctgggggtcttgtggcagcttgtgggtggccatgctttccctgggcactgcccgacccaggggactcagctgcgggtggcacgctcggcgtgcaaggcatttgcttactggaaactacacccgtaagaagatactggggtcttgggaaggaaggtgactgttaacctgtgggggtcagcttacagtgtgagtgttggccagaatgatcaagctctccagccttagcccagatcaaaatccagaggccaggaaggatgtaagcctagctctgtgccatgcagctggttggaacagaggtgcagatacaggctccacccctctgggaccatcagctcccagggtgtctgcagcctcacagcatgactctctcccagtcagcccacccccaaggccccgcagctgcagcttctgctgtgctttcattccagggatgggcagggtgacatcaggccacccgcagcctctggcctcagcctctctgcctaggtggcaccatgggctccaaccagccggggcagctgctgggaccaccccgcacaggcccactctgcagtgagggaaggaccgacaggcttgcggctgctggattactcagtatttttcactttaatatcctaatcctgaagttgttctgcgatgtggtgttctggtggtaaatataatcttttggcagagtttttgaactgtctggaacccaatatcctaagctttttttttttttttttactgtatttggattatattgtgggatttttttccccaaggaggaaaaaacgtattttaaaatacaacatgaagtgagtgaaaaaatttgtttaatgcaaataaaagaattgaagctggagggtgagtgtttccagaggaggccatcaccgtaggaggagaagctggactcagagccagggagtcccagagcctgtggtaggccctgtccttgtgtggggagatcagccagttccaagtgcagggaccaaggacattcccaagcccgtcctcagccagctagtcctgcagggctgttcggagcatccaggtcttctgtcattttttcttccccagacaaacctcctagacataggaagccctttcagaagacacatttgcctctccacagctccacccattatcctttaccactggcgatgttctgttcttcttgggacaccacagcgttatttgtctttccagaccaaaaatatatccctcaggagtatggcggtttttaagctcacaccaagggaatgcttgtataggccttgtgtcttcttgtgatgtttcccagcgatgggcctgaacgggagagactagccaactgttgctgaacgcgatattcttttgtgaataaaaaggccctgattccagccaaaccgggatctggtttggctgggtgtgggacgggagcagtcaccgcaagatccccagacatgtgtctgagcccctgtgtggcctgaggctctcccagttagtcatggcagtagaaagtctctccctgctcgagatgcaaaagactcaccatccaaagagttgggccatcccctgcccgctgtgactgtctagctgtctgccccttgacagggcccaaaatgatccagtgctggaggccggctttgcaaacccaaggcagggtctcactgtgttgcccaggctggagtgcggtggcccaatcagctcactgtaaccttgaactcctagactcaagcaatcctcctgcctcagcctctcaaggagctgggattacaggcatgcaccactaagcctgactcatttctttactttttgtagagatggggtcttgctgtgttgcccaggctggtcctcaattcctggcctcaagtgatcctcctgcctcagcctctaagagctctgggattagagatgtgagccactgtgcctggcctcatgataactttttataaagaaaaaaatttaaatcctctgtttcttctcttcctcatcttcccttactttacccacaaacaggggaagaactttctagcaggaaccatttagttctgtcttgggagcacttgtttccttctcagtttcttagaaagtgcagagtctgcttgctggcaccgcaccgtatcaaatgcttgtgatttccattcggcctgcacccacggcagtgggctctgcccgactgctcctcagcgggggcctgggagggggctgaaaagcctggggctggtgggaagtggtactccctccagcatggcggtttggagtcttgaggaagggtccccccttagccgtggcccagggacactgcccctccccacccccagacccttcccgacaacactgcctgcttgggatgctctaggcagaagtgggcggtggggctggcctccatttcagtgcttggtaattttacggttggggtctccgtcttagaagcaatttcccataattccacttgggagagaagtgtctttattgctcatccccattttaaaggtgggtaattgggggcctcaagagattaggagtcttgctcatgataaaacaggaagtggtgggtctgcgatttggaattctgcgttcctgcaggacaccctgccgcccgtgccacctgttctctcccacgtgatgggcgcaaacccctgagaggtcccttttcagctcttgctccattctcagctgttgtgtttccctctccagatcccccacattgacacaagagatgtgatgcctccgggcagttaagggtgaaaagcgaatgcaggttttctctctcctctttgcccccaatcctacgggtgaatgaggcttgcatctctcttttgctaccatcgagagcagcagctcagtcagctaacttccgtttgcctgccggcatgagttcagcgagtttccccttggttttagagccaaagcctgagcacttggtgtaactttgcgtgctgtcgccctgagaggcggcaccgtcgggccccgagtcagccgtgtgctcgaaccgccccactttaccattcctgttcctcaccggtcactctttagtagagtcccgtccacttaaggagcacttcatacccatgaattgagtaaaattattttacagcatatggcatttttcatgactataattacaaaggattctagacgtcattgatgggggttctccctggcgctaacactgagtgagaagttgacccagttagattaaagctcaagttaataaacagcattcacacatttctaggcctgttgaccaatatcctttaaatcagtgtggctttccaaggggggagcaaataaaaccctaaggtagccagagtgctgttttttccaattaaccttgttcgttttgatttcctttcggttcagaacaatttaggtcaatcttagatttttaagaatgaacctctggagggagaggaaattaactaggccctaagggggcttggttaccacaattaaccccaaaagacagactctcaggctggtggggggcctggagaggggccacatgaccacttcaggccatctgctcacatggagaccctggtgggagtgtcctcttttctttcctgctggctggttaaataaactctgcaggctaccacgctgacgaagggtctgcccatttctcatgctccttctgtcttttagccaaagctgtgttccctctctttctgagaagagggatcagcaaacccttaactcccagagatcgctggtggagttcagggatggaagtgcctgatccaggcagacctaaagcagaggtaatggaagagagatgggaggacagagaagaaaagaagggcgtggggcaggaaggcagggccagactcctttctgtgttaggagcagagccttccttcaccggagcctgggcagtcaatcaccctgagagcgctgggagcctttcatcatcatcagaaggcgttgtgcgtggtgtggatgcacacgtgaccgtgtgccgcacctttgttctgcccgttccttactccttatttaggtgatgaaagatgtggtgccccaactttaagttccacttgacgcagaatttcctgattgaggatggagcctggggctaccttgaggtaattacgggatagtcgttgtacctggaacgtacatttttctaaagttgccacacagtaagactcccacagttctgtccacaccccttcccatgacattattgtttcttcaaaagggaccagccgctgagattttgttagcagggaaatctgtttcacaggaaggagggatgtgtagatgggacctaaacatcgaagtttataatttggtgaaaacctgataaatgggaagaccatttgaaatagatgtttcagtggctgggagtcccagatacccttgaatttaacactgctcattacatacctcagtgaccagaaattggagaccagcctgggcaacatcgcaagaccccatctctacaaaaagtaaaaaaaaaaagagtcaggcttagtggtgtgtgcctgtaatcccagctccctgggaggttgaggtggaaggattgcttgagcccaggagttcaaggtgacagtaagctgattgggccactgcactccagcctgggcaacactgtgagatcctgcctctaaaaacatttttttaatatcatcataaactctgtcagaaatacaaaggagcataaagaatgtaacaaacaatctgtatccacaatctggcctaataaataacacattaccatcccatttgaaggctttttgccagacagagggcaagtccttgagcgggcgtccagtgcaggtgtgctgaagagcccagcctcaagcctaaaatgggatagtacaggacatgaacatgtgaggcaagtggatcacctgaggtcaggagtttgagaccagcctgggcaacatggtgaaaccccgtctctagtaaaaatacaaaaaattagctgggcttggtggtgcgcacctgtaatcccaactagttgggaggctgaggcaggagaatcgcttgaacccaggaggtggaggttgcagtgagccgagattgtgctgttgcactccagcctgggttacaagagcaaaactccgtctgaaaaataaataagtaaataaataacgacatagaagacagaatatggtaggcggtaaaagggaaatgctgagcagcagaatgagagtagtcagagttaagaagagggaggcatcttgggagatcggctgaatgagggcaaacttgatgaaggaggtggcatgtcagttgggccacggagaacgggtaggattatctactttgttctgcatacatctccctaacccttcccttaagcttctcttccaaagtttctctgggaagtttctctttcccttcccagactaaagctctttccctgctgtttgtcctctcttgcttggctcaggctatgatggaaaacgtcctcaggctgggtttctgggtgccagatggcagccaccatgggaggaagggtggccgagtactctcagggcccggctccttggtgaccagccaggtgccctccagccagcggccccagcatgacacggtccaggtaacctcccttcaccgtgctattgggagggtgttttccaggactggtgtgaagtagattcagttcccgagaaggacagagctgcctgatgcgtgaacaggcctctctgagaccagggaggccacagctctgagacatgaagcagatgctgctcctcagggcctgtggagagagaactctaccctcttccatttctgaaagccagtggaggcttctcctcctctggaggattcatttcatttgttagttaacgcatccattccttcaacatagattcattccatgtcagctctgccccaggccttatgctgggctcggggtgtggaaaatggaatcgaagctggtctctgctcctgagaggcttacagccccttttagggtatgtgctggatctggaaagctgggatagaagaaattgggtgactgtgtattgtctttgtgcttttgtgtttttttagaggcttctatgatcagaatatttttggactaatgatgtgagttccttagataatttgaaaatgtgcccctatattctctactgtttagagtggtataatgttggcatgacctcatcttcctttcaagattacatattaaaagaaaatttgactttatattaaacgaagtcaaagctgggttcagtggtgagcacctgttgtcccagctgctagggaggctcaggcagaaggatcacttgagcccaggagttcgagtccagcctgggcaacataatgagaccttgtctctaaaaaaaaaattaattaattaaaaaataaataagtaataggaatcagaccccagcatcatagttgtgcatattacctgttatttctttaagagatatcccttctccttgagttccatttttatgggaattacttgctttaaaaaaaaaaaacacacacacacaaaaacttcaaagatacagcattgacatgacgataaacttccatttctttaaataagctccttgcaacatctgatgtatctgtaacaaaaagaagggcaggagaaggagcttgcatttatgtttatgaacagggtaaactcagagacttgcaacctttaccccgccctcccccaccccaccctcaagaagtcccgaagaacaaaaggcaattcagatggcagaatattacttctgttgctgtagcaccaaactattaaaaataaaactgtccctcaaggcaaaacatttcatttattttcctttgaatgagtaacttgtttattaagatgaactaagtggctaaatctagatggtacgcaggcaagaaaaattgatgtattgtagcctttcggaaagtatgctttatgttccctggaatcatctctgggttttaaatgaagaagagctcgtttagtcagatggggagctgctctccctggaaataggcatcacccggctctgcaatgtggaatgtcatatttgaccttggttctttcgcaaattggttctttctgggctaaatcagtgtgttgaaagagttagctaggtttagtgatcttcaaaggaggaccacgttcctgcctcaactgcgtctgcagttttttgaagtgtttaatataaaatcgtttcacttttgccttatttcatatttgagatcactgtgctactgcatctgttagagaggcaacacagagcacagggagccaactgcagtccctggagcttctgagagagctccctttgttgcttcctgacccagcctcagaggcatcccgcccacagggaaggatatttgtctcagcagggaggttccccattactgtctcctcatctggggacacaaatgtgatgtccaattcccctctgattgaggtctcatttgccctaaactaatgcaacttgaaaggagaaaagggtgtcaatggttaaaacaacaacaatgacaagaacaacaaaaacctccacccaatttagcagtgaaacaggaaacgccgtattgaggagagaagcttttagttggaaaaaaaatttctctttagaatttggacaacaaatgactctcactctcttttctggtggtgattgttttatttgttaatttttttttttttttttttgagacggagtctcgctctgtttcccacgctggagtgcaatggcacaatctcggcccgctgcaacctccgctgctggggttcaagcgattctcctgcctcagcctccctagtagctggcattacaggtgcccatcaccacgcccagctatttttttttgtatttttaatagagacggggatttttaccacattggccaggctggtctcgaactcctgacctcaggtgatctgctcgcctcagcctcccaaagtgctaggactataggcatgagccactgcgcccggtcgattgttttattttaatatcacgacacacatattattcctgatttgtaatctcacgatacccgccttgctcgccaagagtcctgagtgctggcctggtaaagatgattatctccatctttcagacgaggaaaccaaagttcagagcacaggtccgcagaacagtcacagctgccagcagttgcacacccacatgcgccatcccatttgatcatcaccaacctgccggttaggttttcttgtcacccgaattttacaaaagtggaacagaagcaccgagagaataaatgagctgcctgagattcatcaactgctggtggaactgggcttagtcctgcattctttccaaagcccccatgcggtgactcagtatttggccatttttctttatcctttttgcctggtgactctgaagagagcccacctacagtccagcatgtctggatcctgtgcagcgggcagaggccagaggccatggtgggggccccagaactcaggctgggaatcccaggggctactccagctttcatgtcaccagagcagtgacattcgggccctcgggggcagactgtgcctgtggcttctcagtggggtgccttagggtcccctcagcagatggatcccatctcctggtctggttagcataagataaacagggatagtagcagcagttgtcactctgagggagggaaggggaagggagggctcaggtgaaaagcagaagggaactctatggctgtctttcttctccctgtttacctgtccacccatctgagagataaaagaagagcagaggagggtgagtgaggaaaaagcaggagggtattgggtgtggggccgatggttttcactcaatccgccgggagatctgaatatcaactctctatggaagaacaagaaccgaggtgtctcttctgccccatttctagcccagggtgaccccaggagctctgcagtgtgccgcatggaatcgcctaagatgggactgccttggaacaaacagtttcaatgtctatttcacatgtgcgctctagctcagaattttaataagcaaatatacatggtaccttgccgtaggggggctttatgtttctaaatctatgaattaataaacaggatgagcctttttaaaaaagggagcttggggcagaatgaaccactaaaaagttattggctcttaactcctgctttttgtagaagcttgacaggcagctgactcagccagacctgaaaccctttccccggttcttgttggcatttctgactttgccatttcagttggcactgacccttccaagactgtgtatgccaggagggagcatctgcccccatctactctctgggaagatgtcctctcccaagagtcaagagtgtcttgttctgaccgtgggttacttctctgtgtctgtctgagaggggaaagcattgtcatcacacaggaggtagcaaatacctacctctttttttttttttttttttttttttttttgagacggagtcttgctctgttgcccaggctggagtgcagtgatgcgatctcagctcactgcaagctttgcctcccgggttcacaccattctctcgcctcagcctcccgagtagctgggactacaggtgcccgccaccacgcgcagctaattttttagtttcaccgtgttagccaggatggtctccatcttctgaccttgtgatctgcctgccccggcctcccaaagtgctgggattataggcgcgagccactgcgcctagtctgctctggtttctaatagaagtaggtatttgcagctaggcgcggtagctcatgcctgtaatcccagcactttgagaggctgaggcaggcagatcgcttgagcccaggggtttcagactagcctgggcaacatggagaaactccatctctacaaaaaatacaaaaaattagccaggtgtggtggcacatgcatgtagttccagctactcaggaggctgaggcgggaggatcacctgagcctaggaggtcaaggctgctgtgagctgtgattgcaccgctgcactctagcctgcgcaacagagtgagatcctgtcccctccaccccaaaaaaaagaaaacaaagaaagaaaccagaacaccaggtgtgtcttcctgagttttcaccctgatcactgcctctcctgccagctccctgctttccagggaagagttggctgcgccaggggacagagcactgactcccacccaggccactgggacagccatatctaggcctcaaaagactatgggggttcctagcaaattccaccttatttgacttctccgaacagcccaaactctgctgggcttcttcccttgccttcataggagacttgatgcagggggcagaggtgagagcccagggggacagctggccttcaggaggggtccttgctgggtgtttccaggagagcttcggcctctctctccgcaccatgttccaggtggcgttgaagaccagtgggtaatttggggggtgtgggaacagaaaatcagaggaacagctagtgttttcttccttgagacttgtttcccctttgacagtttagatggatagtaacaataatcaccgataggaaagtcatcctgactggggtctgaagccttccgtggatgttcccgtctaattctcacagtaaccctgtgggcttttaaggtaagaatgatcactgactccacttttcaccagtgtcggaactgagacttggagaggttcagtgaccagacgatggagtccagggtccagggtccagggtccagggtccggggtccagggtcttcacagcctgtgctccctccccttccgtttctcctcttgctttgggtttgggaagcctccgcggggtgaggtggagagtgcgcctcactagtcaggcaccccgaaggagtaaggcatgtgactgtacaatatcccaataaagcgtgtgggtggtggggatgggtgggcgaggttgagatccattctttaaggcattaaatactgtctctttcaaaaggaggttgtgctgttttgcagctggttttctttaactaccagaaacaccagcattgtttcagaaagccacagaatttccaaacacaatgagaattccaagaggatggggtgtgggttttgggggctggggtgggtatggacaggcttttggggagggaagaccacagcctgagtggttttgtcccccacgggtaatgaatttcacacggctccactgtcctcagttttatctgcaggatgctcaagttgaagcctgggaaagaaggggatcgggaaggagcaggccccagggattacagtggccataaaaaccaaacagtgacccaggacagccccatttggtgtgacctctaatgactgccttccctcagctggtgtcagaggaggcacatggtgtcagttaagttccaaagtgacatttgtataaataagtttgttaatgggaaatgagtttttttttctccctctccaatcttaagaaagtgtgtagcctatatccaaatatttctgaaagagcatcaacagtaacggcaaacaggggagctaatgtcaccaacaaaacttgtgaggtcaacccaaagaaagaagggaataaatgagcaaaactttggaaagagtttctcacatgctgaaaacactcagcaatatttctaacaagcgtggtggcccttcagtcagaagtggcctttctctgaagtttgaagtaaaaaaaaaaaaaaaaaaaaaattctgttcttcctgcttttttttttgagatggagtttcactgttctcacccaggctggagtgcaatggcatgatctcagctcactgtaaccttcgcttcccctgttcaaaccatctcctgcctcagccacccaaatagctggaattacaggcccctaccaccacgtccggctaatttttgtatttttagtggaaatggtgtttcaccatgttggccaggctggtcttgaactcctgacatcaggtggtcagcttgcctcggcctcccaaagtgctgggattacaggtgtgggcacaccgtgcctggcctattcttcctactttttatactttgtgtttgcattcaacttgacaaactcaggcagccttaccagatagcttggtatttgtgagattcagttctgagttttgaagtaaaattttaaatgtgattgtttttatcctttaaagtatagagaagtcaatagccttggcttctaggtctgactgactgttctatggataatggatatggataatgtgaattggaatttatatccgtggaatcaaacatgttcaactgcatgacatgcatgacagaaagtggcacttggcagagacagagagggaaacagtcattctcccgagctgtgaagagtgcaactctagagtacattctcagttcttttatctgtggaggaaaaggcacgttgtcatggttaagaaatatcacatgccaacttagtgacgggggaaagaccctcttaacaaatggtctgggccgggcctggtggctcacgcctgtaatccagcactttgggggctgaggcaggcggatcacctgaggtcaggagttcgagaccagcctggccaacatggtaaaaccccgtctctactaaaaatacaaaaattagccaggtgtggtggtgggtgtctgtaatctcagctacttgggaggctgaggcaggagaatcgcttaaacccgggaggcggaggttgcagtgtgtcgagatcgtaccattgccctccagcctgggtgactagagtgagactccatctcaaaaacaaacaaacaaacaaaaacactaacgtatactctagaggcttacacaattaattgtagaaaatgaaactctgaaagaactagaagaaaatataggtgaatttttatctaatctcaaaatagagcagccttattaaaatacgacagaagggaagcaaaatcaataaatgagcctgaggttgaattacagattacttgtacaagaatattcatagcagcaccacagcaaaaccttgaaacaacccaaatgttgcatattgagagtggataaacaatagagtttttcacacaaaattttcaaaaattttaaaaacaatacccccaaatcgacaaattgtaatgacatataatcctatggctaaactttacaatataatattaagtgcaaaaaacgttacttaatacacaatagcctttcttaacccaatgttttaatatgaaaaatttcaaacattcagtaaaactgaaagaattttctcgtgagtacctgtatgcccatcatcttgtttatccctttcacactttgttatgtttgctttctcacatactcattcattattccctctaattcagcagtcctcagcttggggtgattttgccccccaggaatatctgacagtgtttggagacagttttagttgttacagctgggatagggtactactgacatctggtgtgggtagaggccagggacgctggtcacagcctgcattccacatggcaagcccccaccacagagaatcagctagccccagattgcagcagtgctgaagctgagaacccctgctggaatccatcttattttctgatacatttcagagaaacctggattcactggtatacttcctcctacatatttaagtatgtatatcattaactagatttccatatttatttacagtgtttttcttttgatgtgaaatgtacatgcaatgaaatgcagaagtcttaagggtacattcactgagctttggtcagggcatgcacctgtgtaacccagactcctgtcaggacagaggaccttaccattggcttagaaaatcccccttaactcgtctccagtcaagcctttcagcctcctttccccaggaggcaacaattattctattttttttccaccatagaaaaaagttagaacagtggttctcatagttttgtgtgttttagaattgcatataaatggaataacaacagatgcacgctttgtctgagacttctttcactccatagcacagcagttctgcaagtgtgttctgcagacctcttaggttctccaacactccttcagggggtcccatatgtcacagctattttcattataattctgagacatttttctcctctacactgtgctgacatgtacgtagatggtgcaaaggtaacggtgggtaaattgaggcagtagcaccaaactgtacctttgtcagtgtgttcttcatcaccaccaacttacagaaaaaggagtcagcatcacttaaaaatgccctgggtgaagcagaacagatgtgcatctttttaaatctcagcccctgaatacatgttcttttaatattctgtatgatggccgggtgcagtggctcacgtctgtaatcccagcactttgggaggctgaggcgggtggatcacctgaggtcgggagttcgagaccagcctgaccaatagggacaaaccctgtctctactaaaaatacaaaaattagccgggtgtggtggcgcgtgcctgtaatcccagctactggggaggctgaggcaggagaatcgcttgaacctgggaggcggaggttgcggtgagccaagattgcgccactgcactccagcctgggcaacaagagcaaaactccgtctcaaagaaaaaaaaaaaaaattctgtatgatgtaatggaaggtcctcataaagcacttccactccaccgtagtagcacgattgtcttcaggaagggcgtatacgcagttgtttgagttgccagccaagctagctgcttttctcatggaacaccatttttacctggaagagcaactgaccaactacagttattcaggtttgcgtatgtggcagtgaagctgtcacttcaagggaaacagctgacagcatttgttgctattgatacaacttgaacttgcaaggaagaattagaatttttgaaaacttgtatttgtcaccatgaacttgagagcttcccaataactaacaatttttctgacaagattggtggtgatattgacatatgatttaaaaacataatgacatgcatcaacatttgcaagatatgtataactcactgaataattattttctaaatgacctgtgtaggatattatacagttatacacaggtaaaagttccattccaactgtggcgtagaccaatggatttccatgtagtggagtagaaaaagtttactgataacggtttcagggcccatattgcaactaacctttaagaaactaccacttttaaagttttggtttgtatcaaagatgaatagccataattatctgaaaaggctattaaaatagttcttcatattcctacttcatatctgtgtgaggctgagttttctctatattctccaaccacaaaaacttccagatgagtttccaaggtagtttacaccattttacacttctaccacaatgtctgagactataatagcctttttacaaatttacaacagcaaaacacacaatttcagaattcatagagatgagatactactgtgtaaaaagcaaagctggggactgatacccacaggacttgaggtggcagtaaccttgggtgggagagtcctgcatagccagatgtgtacctggtgaagggccagttaaagcgctgttgtttaaaccaaggagaagggtcctgggggtgccctttgccataggaaactatttcccatagtattagtatctgtggctaacaacatggccacaggctgtactttcctgtccaatctctgtgtatctaagtctgctgaggctgcagattcctgcaaagagcagtcgatggccctctgcaggagggctgatggagaaaacatgcgtcggatgcttacaccggccgtgtcagagaagaggaatgagcctattgctcctgccatgtaatgattcctgttgggagtcagtgactccttttctgtggggctaccctcacccatccacatttctggctttccttgctaggggttcttccctcgtcttccaagtcctgtgcaggtggctggaggccagagaggactcatttggctataatcagaggcattcccctttcctcggtccgtagggatggaagggtttgagcccgagtttatttacccttagcaaaacacaactaggttttattattattattattttagtgcttgggataaaaaggcccataaaaacaatagcataaaacagcttttactgatcaaacgtcatgctgatttatttgtgagtgaaatctgaaccatatggtctggcttcccttaaaatgcacagggggttcaggattaagggaacaaactcttggcaaatttgttttgcgtttcactgagcacatcatgttagaaacaaaatagagcaattgttgagtgcttactgtgtgcaggaaattgtgcttagtgattgatgtccatgatctcgcttcatcttcacaacgatccatgcagtcagcagcgttccccacgaggggcagcagcagtgctgagctcagggccctcatgacctgcaggaaggtgggcaaagtggggaagatctggaatccagtggggaagagtcgtccaccagtgacagcacttccacctaaagtcccctgatcgtgaaagagatgaaactgcaaacgaggacgtgaacttggggcctgtggatcagctggccttctcaggttgcagagagccagctgtgcattgtcttattcccttgtcccagcagagactgaacgctaagtctttcccaccatcaaggcatgaggtttctctctttgccgcatttgtgttgggcatctcagccctcagtctgtattcttgtggagggtgcacctctttttttttttgtttttttgtacacacagttttgctcttagttgcccaggctagagtgcaatggcgcgatctcggctccctgcaacctccttttcccaggttctaagcgattctcctgcctcagcctcctgagtagctgggattacaggcatgcaccaccacgcccggctaattttgtatttttagtagagatggggtttctccatgttggtcaggctggtctcaaactcccgacctcaggtgatccacccgcctcggcctcccaaagtgctgggattataggcataagccaccgcacctggccagatgcatctctttgagtttgggaacgaaaagggtatgatggcagaatcatgtgctgccagtcatgatcacagtgatgttcattctggttcctgggcttaagcttctaatttgctgtaagaaagctcagtgggcttgccctttgcctaagtgaaaccagcttatttccacttttcttcaggcaccctcacggacatccagtgccacggtcctgctttgtcaggcagcatctttcagattcttgaaagacaggcagcttgtttcgaatgacccacagggaatggtgcaccattcactcagtccacccctagcacgggccagtcctatgtcgttttttggcatttttgaggaacagctcccttttcagtaccaggtgacattattacccagatccagttgcggagaggcgtgtgtgtctgtctggttgagctgaaacgtgggcagatcagaaaggaaggaaaactggattaagccaggatttgcttacctggaaggtccagaaagaaattccccttccttccacagccagaggatttcaagtctataatgttgctaaaattagcagtgtaacaaaacttcccatgtgatgtagcacaggttgatggggtaagccagtgtaacatggaaacccactggcacctctgcatctgggcctaaggctgcggcctccgtcctcttcgccatcattggcctctcttgtttcttcccacccctgtcacaccgcccttgaccatggttgtctgtcatgtggattcctcacgggcagagatactaccctctgagcttgctccctgctttgctctggagtgtggaatttaaaacttgtaatgataggagaagggaagaacacagttacagtattagactcactgtttcctgagccactaaatgtatcagactgttatatttgggttattttccaaaaaccttttggtagtcattaaaaaaacactctgaggctgggtgtggtggctcacgcctgtgattccagcactttaggaggctgaggtgggtggattacctgaggtcaggagtttgagaccagcctggccaacatggtggaaccccatctctactaaaaatacaaaaaattagccgggcatggtggcgggcacctgtaatcccagctacttaggaggctgaggcaggagaatcgcttgaacccgggaggcggaggttgcagtgagctcaggttgcgcctctgcactccagcctgggcaacaagagcgaaactctgtctcaaaacaaaacaaacacactgtggctatatttattcatggaaacaatgatataacattcttagacttgccttcaaaggccacctgtattaatagggtcccacgcatgccacttataacatggattctgtagcacattgggacatcggaagccttctccattcactctcccttgctctccctattgttccagcacctcctgagggggccctctttcaggagctttgatcattccctgcacttgtacatttccataactagcaccacctttgtatctagatgtttgcatgcaaggggcatctccaggtatcttcccatgtatccttagttgcccaggcgggcggatcacctgaggtcgggagttcgagaccagcctgaccaacatggggaaatcccacctctactaaaaatacaaagttagctgggcctggaggcgcatgcctgtaatcccagctacttgggaggctgaggcaggagaattgcttgaaactgggaggtggaggttgcagtgagccgagattgcaccaccacactccaccctgggcaacaagagcaaaaactccatctcaaaaaaaaaaaaacaaaaggcagtttccgcagttgtaagtaggactagaggaaagagtgatgataatattgataacaataaaatacaattattgagtgcttactgtatataggagatacacttagtaatttacatgtattatctcacttaatcttcgcagtaatctgaggagataatgttaccctcattttgcagctgaaatgtagcaggttgcttcacccctggaggctgcacgcctagtagtgatggagcagaggcaggagcctagcgtcacctgactccagagttcattctccaatcaccgcatgatactgactcctaatcgtagcctgatggctttaacaagagaaaataaggttaccttccagctagagggatttattattattattattattgtatttctttatttattttgagacagggtctcgttctgttgcccaggctggagtgcaatgatgcaatcttggctcactgcagcctccgcctcccaggttcaagcgattcacatgtctcagcctccctagtaggtcagactacaggcacgtgccacgatatctggctaatttttaaaaattttttttagtagagactgggttttaccatgttggccaggctggtcttgaactcctgacctcatgtgatccacccacttcggtctcccaaagtgctgggattacaagcgtgagccaccgccccctgccggatttatcttacccatgtgtctctgacaggatatattgtcaaattcccaaactgtatttttaggggggttgcaaattttgcttccaaatgatcttctaagagcaggatattctctgcctggagtgatgagggtaccatttctaaaagaggtacattgtagttcaaactcctgcaggtaaggagccgtgacttactaactttcaactttgacacattcgcaggtaagagcagagctacgcactacagcaaaatccaggctgtccgtcagcagctgatgtgcccggtaccttttgtcttggccatcctgttgttcattaatctgatgtatactcactgtgtttgcgtttattttcctaacatttttagcctcatcctattcctataagtgacaggcactgtaactattgaaagtactgattaaaagtagtgtttgattattctgtaagcaaagtaatactttggattaaaacaaagtgactgtcatctgaatcttaatttctgttattttccaaatttctttattcattctcctgttgatgtatatgaagatgaacaaagagagcaaataaaaccactcagaggccgggttcggtggctcacgcctgtaatccccgcactttgggaggccgaggtgggcggatcacaaagtcaggagttcgagaccagcctggccaacatggtaaaaccccatctctacaaaaaatagaaaaattagctgggcgtggcggcacatgcctgtaatcccagctactctggaggctgaggcaggagaatcgcttgaacccgggtggcggaggttgcagtgagccgagatcgcgttattgcactccagcctgggcgatagagcgagactccatctaaaaacaaaacaaaacaaaaagcaaaaaaaaaaaaacaacaacactcagaacccacacctacagtgtaactagagacgaggtgtaccgcagacttggggaaataaatgtcccgaagcagcagagctaactcccagctcccaccaaaaacgatgttacttccaaagatactgcacttgaacaactgaagagagtgctcttgaaataagaaacttagaggcacccaagggatttcagacctatttttgctggtctaagaaaatccaattgatgtaagaatgaccagaaaatggcagcaaacatccataaaaatttgctataaaaagaaaactgccgggcgtggtggctcacgcctgtaatcccagcactttgggaggccgaggcgggtggatcacctgaggtcgggagttcaagactatcctgaccaacatggagaaaccccatctctactaaaaatacaaaaatcagccgggcatggtggcgtgtgcctgtaatcccagctactcgggaggatgaggcaggagaatcgcttgaacccgggaggcagaggttgtggtgagccaagattgcgccattgcactccagcctgggcaacaagagcgaaacttcatgtaaaaaaaaaaaagaaaagaaagaaaggaaaaagaaaacgaaggaaggaaatactccctgaaaacaaccatgaagaaaatgaaaattgttaacaccacctccaacatgaactaaatataattgcacaagcatttaaagaaatgaaagaaaacctaataccagaaatttgaaaaatctcaaacaaaatgctggaaaatgtaaaattaaagattatgacatgccagaaagaaatggaggaaaaagacaaaaaaaaatcatctcaggcatgaagacgagattacaagatgtccattcagattctactgaaaaaaattataagggatattgagaagaggaacgaaaccattcaagacaacaaaaatgagataaagagaggtgaaaagaatcagagaaaaagtgatatataagctaggcaaagaaagtccaacacacaaaattgaagttgaagaacaagcagatggaataaaactaatatttaaaactacaatctaggctgggcgcagtggctcacatccataatcccagcactttgggaggctgaggtgggcagatcacctgaggtcaggagtctgagaccagcctggccaacatggtgaaaccccgtctgtactaaaaatacaaaaaattagccgggcgtggtggcaggcacgtgtaatcccagctacttgggaggctgaggcaggagaatcgcttgatcccgggaggtggaggttgcagtgagccaagttcgtgccactgcgctctagcctgggtgacagagcaagacttcgtctaaaagaaaaataaataaaactagaatccaagaattctttatggaaaaaagaagatgtgactctacatactgaaagtttctacatgcatctgggaaaattgacccagcgtgattaaattctagatgtatcctcataaactttgtggttaaagatgagggagaaggaggaggaggaggataaggaggaagaggaggaagaaaacaaacctctgggcctccagtcaaaaataccaagtcacttaaaaagaaaaaaaaattagattggcatcagccttatcaacagctacgtgcaaagcaagacaaggatggaacaatgttttcaagaaaggtaaggaccatctgaatcaagaattttaaatccagcccatctgtctttcaagtatcaaagttatcgaaaaaaaagttttaatcctacgagaactcagggactactgtcctaacaactccttcctaaagaatatgccagagggttgttaccatcaaacagagagaagactaaggaaatttgtcaaaataactggtggtttgaacaaaagatgcaaaactactttgaaagagggcttcatgtttcagagattaatcggacgtatccatccataagatccttgccaagaaagtttgaataataaaacaatggagctagattgcaatgttttcaccaaatccagaatctctgaagaaattaggatatggctttggcagctctagacgccaaatttgtaaagcaagagaagggaaaaagtgcaagtaattaatggagcttggaaaagacctgaagcaggacagtcaggagtagatgaaagggttttctaagaaaagaagtagaaatgtggaatttggtaaattttattgagaaggcacccgagtagatttaggcttgtagttcttacaaacattaaaaatgttttattgtattaaagagctaatactccttaattatgacttcattatttatgttacagagaagatctagatgcactatttacctccttttgttcctaacctagaaatggtagcaaatacatgtggtttcatttgttttttttttttttttgagatggagttttgctcttgttgcgcaggcaggagtacagtggtgcgatctcagctcaccgcaacctctgcctcccaggttcaagcgattctcctgtcttagcctcccgagtagctgggatcacaggcatgagccaccactcccggctaattttgtatttttagtagagacggggtttctccatgttggtcaggctggtctcgaactcccgacctcaggtgatccacccgccttggcgtcccaaactgctgggattagaggcatgagccatcgcacccggcggtttccttcctttcctccaaagtcacgttgcacatcaatatgtgatttggcaatggttctctttttcactgagccccagtgaagcctcagaattctactcaacgtagcacacgaggcagccattactactctatctgcatttgttggaagttgaaatatatttgctatccctgccctaattgtagggtctgtagcctgattacttggcatcttcatctcacttgtggaaactaacgggattacagacgcactttctcagcaagcgttcattagtcactgagtaaatgacaaacaatgtatgaggctctgggcataatgaaatgattaggacacatttccatcctccaagaggctcacagggcccagaaggaagtgaatgattctgtagaatttgccttgtgaatgtgttactccttaagttatatcgaacattgcagtgatcaagaaatattctactttgtagaaagatcctggaatcacatagaccccaagttttaggcatggcaaaactttatgcacaatttcatatgtaaagtgattttctctgtcctcatccttagtaccttgctactcaaagcgtgacctgaggaccagtggaaagatattacctgggtacttgttagaaaatgcagaattccagtcccataccagatctcttgaaacagaattctcattgtatgaagatacccaggtgacttgtatgtacataaagtgtgagaaacactgcagactcttagtgtccagctagaacaagattgatttgccacctgccacttttctttctccctacacacacttaaaaaaaaatctcttaactaaccacagacacatattccaaatctcatgttctctctgtcataattttcttatttgtaaacttaacatgggaacactattagtacctgtcctgtctgatgagagtgagcatttgctgagatcatgcatctgtggtgttcagtagagtgcccagcttcataaatacatgttatttgtgaatgatatacatgatactagtttaatggaaaattgggacttagaaataatgtttcgggctgggcgcggtggctcacacctgtaatcccagcaatttgggaggctgaggcgggcagatcacctgaggtcaggagtttgagactccagcctggccaacgtggtaaaaccctgtctctactaaaaatacaaaaattagctgggcatggtggcgggcacctgtaatcccagctgctcagggggctgaggcaggagaattgcttgaacctaggaggtggaggttgcagtgagccaagatcgcgccactgcacttcagcctggcctttagaacgagactccctcttaaaaaaaaaaagaaagaaaagaaaaaagaaatttcaacaccgtagcctgttcccagtggaggaaattctgaactttctcgttgttggaactttgtttgatacctctaagtaaatacccaataaaatggtatctaacgcccccctgccgggctgggtggtacccacacttgtacctcgcactcacactcacacacgtcacacacctgtcagggggcacagccccaggtgagcctgagtgctgtgcttgcctcgtggggtgctccatggagatgggtctcccaggcctcagggcttcctgggtgcacctcccgtttctgcgtgcagggagggatggctacaggactgggcgggagaactttcccagtgtggtgaggcgtgctggtgagacagcagtgtttcctgggttacatgtgggcaggactgggttggagatgggcccgcaatttggcctcctgacttggggtgctccagtctgcaggtggaagttcttcccggcggcttgcaaagaagaaaagcgaggagaagggcactgatttattcagcagggcatttccttggtttggctgaaagcttttgacttgcgtgagctcagcaggggagcgccgtttccaggcctcgcaacaccggcctgctattaagtgtttctaagagaataaaagcctgttgtgttaaaaggacttgccctccgccagcagcagtgggcccattagccaatccgttggacacccggtggcacacaggctggctctgcaggaggtcctcctggcctcctgcccctgtgtctttcagaaggcagagtccgtgggagagatctgcttccccatcctcctgcctggtggagctgagagtgtcaactgacactgtcccttcggcctcctcctctgtccctactgcgctgggttgagttgcctgtggaggggctccgcttcccttcctttgtggagctgatgtgttcaggaaaatattcgaatatgttagatttgtataaactaggtcattactctcttgctttaaggttatacttcaaaggccatagttaattaaaggtaggtgtcctttgtcattcaaagtgaacatttgtgtcagttcaataatatttgcttttaaatttccgttaagacatacgggttgggtgtggtggctcatgcttgtaattccagtgctttgagaggctgaggcaggaggatggctcgaggccaggagttccagaccagtctcggcaacatagcaagatcctttccttaaaaaaaaaaagaaaaattagccaggcatggtggcattcacctttaattctagctactcaggaggcagaggtggggggatcgcttgagcctaagagtttgaggttgcaatgagctatgatcacgccactgcactcgagcttgggtgacagagactctggaaacaaagaaaagaaaagaaagggagagacggagggagagaggcagggaggaaggaagggttcagaatatagaaagagggaaggaaaggagggagggaggaagggaataagggttcagaatatagatagaaaggaaaagtccacagaaaactggagtaaagtctgaagctcctgaaataatagtcagtgtgctaagcaggaacagtgtgtacaattttaagacatgagagtgaaataccgggtttgtcatttgcataagtttttgagtagttagaataaacagtgcttatcgccttcccaaaacaccccaccactataagctgcttgtacacactgcatcacttatttttttttttttttttgagacagagtctcgctctgtcacccaggctggagggcagtggcaccatcttggctcactgcaacctccacctcctggggtcaagtgattctcctgccccagcttcccgagtagctgggactacaggtgtgcgccaccatgcctggctaatttttctatttttagtcgagacggggtttcaccatgctggtcaggctggtctcgaactcctgaccttgtagtctgcctgcttcggcctcccaaaatgttgggattacaggcgtgagtgagcctctggcatcacttatgttttaatgaccaaggtgtatacaggtaagaaagttaagcatgtaagtgccaagttcatgtcttggttctatcatttaccagccatgggctttgggcaagttagttttaacctcattcagcctcaacgtcttcaactctaaaatgggaataaatgttgcctccatcatagatttattgtgaaagttaaaggatattgcgtataaaatggcttagcatagttcctgggacgtaattgacaatcaatattataattattaatatgtgaactataggatttttattatttaaaagaacctttaagtgaatttcttataaacctataatgttagcaatgctatgaataaaatttgttttataaggttgaagtttggtatgttgtattttcttgaagcaaattttataatgcatgcgacttgatttttccttgtcctttcctatttttggtaagaatgtctaaacctgaaaacaatggagtgtagaaataaaaatacatgatgcggaatctgagaatgccaatgctaggggaaaggaatactgagtgtgtgtggccgtgagccccgtgggggctgggatttgctcgctgctgtatccccagggcagaacaccatgggtggcatgcagtaggtgcctaatcagtgtgtgttgcttgaataaatgaatgagaccacatagcccaacaccttcattttgtagatggaaacataaggcacagagaagtaaagtgacttgtctgaaattacttaaggccgatctgggactgagtctctggtccgtgtgatcacaaatgcttctaaggctcacaacgtagcagaatttgtctgcaatgaagatcgtggtgtcttcagcagcacactggctggctggttatctctctttcttcctctgtcctctgctccctctttctacttcttcccttctttcttcctcccattcttgcccattgcccctggtggcgtgtcctttgctaaatgagggctagacagatgtaacttacagctctgtctcataccacgcaactctaaagtccatccttagactacgacttagagcagatgtgaatgtttaacctcccttctctctggacatatggcatcatcttatttctctgttagctggtctgccctcctgccacccatttcaaggcactgttggctcctggaagccatctggatggagtttttgtaacgggaaagtgctcctccagcacccaggaagccttgggtgggtgatggtccctgtgatcacccagccgtggtaaggcctgcttcccttgcttagcaaaaccgtaccctggtggatggtgatgctgcagccggggcccagggggtctatgagcatcatggcaaaaaagcctttatgggagctcccagtttactactttcagcctttcggaaacacacacatttccttccattctttactggcaacactgtcttttgtacagactgtatttgtttggattaatacagggagtctgcaaatttttgttcaaataagaatattgtagctgggtgcagtgttccacacctgtaatcccagcactttgggaggccaaggcgtgaaggttgcttgagctcaggagttcagagccagcctgggcaacatagtgagacctcatctctgctaagtaaataagtaaaaattaatcaggcgtggtgacatgtgcctgtggtcccagctacttgggaggctgagatgggaggatcacttgagccccggaggtcgaggctgtggtgagccatgattgcactactgcactccaacctgggcaacagagcaagaccctgtctcaaaaaaaaaaaaaaagttgttatttggccaggcatgctggctcatgcccgtaatcccagcactttgggaggccaaggcaggcagatcacctgaggtcaggagttcaagaccagactgaccaacatggtgagaccccatctctactaaaaaaaatacaaaaattagctgggcatggtggcaggcacatgtaatcccaactactcaggaggctgaggcacaagaatcacttgaacccaagaggcagaggttgcagtgagccgagatcgcaccactgtgctccagcctgcgtgacagaaacttcatctcatctaaaaaaaagaatattgtcatttgagaatcacaaaactctgatctttttaaacataggagagtgatatagagcagtgcttctcaaactgtatttgatgaaggaccagttttcaaattttccatatcgtgttgcagatcaacctatccatcaaagacaataaaaatgaatagaaaaatggaaaaaaatcccaaacccaaaagacattaaaaagtcctcaattttttttattactcagaacaattgggctgggcatggtggctcacacctgtaatcccagcactttgggaggcagagacgggtggatcacttgaggtcaggagtttgagaccagcctgcccaacatggcaaaaccccatctctactaaaaatacaaaaatttagctgggtgtagtggcaggcgcctgtaatctcagctactcgggaggctgaggcaggagaattgcttgaacctgggaggcggaggttgcagtgagctgagttggtgccactgcactccagcctgggtgacaagagcaaaactgtctcaaaaaacaaaacaaaacaaaaaaaccccaattgatctaaaattatacatattgctgcaaaaaattctaaatgcttagtctcaatttctacacttccttctgggtgttggtagcaaactctctgtagacccgactttgaggagctcttgatatggagacgtggtttcttacgtctaatttcgttttccaccatctactgcaagagttgtattttctgcctcacgtcgctgtccttctcccagcccattcattttacttcccctctcagaatggcctgtgtagtgggaggcccaggacatttagtggaagatggacatgggcaggagttaacgcgtcctccagagaatgcctccatgttcttccgtcatccgtgcagatatcaggctgcagtcccgcagaaaatgatgatgttgcacaaggcgaagaagcagatattgacatgaggccaataaaacaggtcatgagccaataaaaatgaccatctgattcactttccagaagagctacgttttaatgatttactagaaagcgaattctttctttgcatcaatttttatcaaaaacttaatgccattaataggtgaagaacacatttttgattcattgactaggattatggttagtaaaatgattttcttttgtttgggttttcattgttgttttagacagagtctctctctgtcgcccaggctggagtgcagtggcgtgatctcagctcactgcaacctctgcctcctaggttcaagcaattcttctgctttggcctccatagtagctgggattacaggtgcccgccaccacgcctggctaattttttgtatttttagtagagacgggttttcactatgttggccaggctggtctcaaactcctgacctcaggtgatctggcctcccagagtgctgggattacaggcatgagccattgtgtcctgaccagtaaaatgattttctgaatgttttagtgtttttccttccaaaagttgtctttcctgacagtgtatttttattttactatataaagagtcactttccggccgggtgtggtcactcacgcctgtaatcccagccctttgggaggccgaggcgggcggatcacttgaggtcaggagtttgagaccagcctgggaaacatggagaaactctattaaaaatacaaagattagccgagtgtcatggcgcacacctgtagtcccagttactcaggaggctgaggcatgagaactgcttgaacccgggaggcggaggttgcagtcagccgagatcgtgcttccagcctgggcaacagagtgagactctgtctcaaaaaaaaagagagtcatttcccgtgaaaaccacgtggtctttctgcatccctaggggttattctggtgcctaacgacttcctgagtccactttcgccgcttccatggccacattcgctttatttttctcttcttaggggaggggaaggcagggcatagttgctgtaatttgtagagttgggttgatcagtcgcaccttagtgtatatacctcagtgtggaaatgtctgaaaattgtaactttgggtttgtagaatttgttttccatttcataagtcctggaattttaaagtcctgcattttcggttcgtttagaggaagctgcatatacacatacatgtacagacatacgagtgtgtatagaatgtggagaaataccactgccctcagactctcgtgagattatatttaatctttttccttctagggaaaatttcaaaaaggtaggagggggctcgtgatatattaacatttttaccaaaagctctgttagggctggaggggagacagcagagaagagcaacaagggaagttttagtgagatatagccatatcagaaaagcaacaatacatttagggaagctgggagaggcaggagatgccgctgtgggagggagctggaaggctacagggacctgccagagggaggctggaggctgtgggccaggtggctcagggaggctggaggaaggtcagaaccagcctggcagagagcctgaagtgacttggagaatgaggtggaaagaaacttgcttcctctgtgccctgagctcaaagataaaggactctggcccggcccaaggtccctgcccccagagtccccgcccagggatcatggatctccaccttttcctactcttgggtctcacagggcctggggattgggaaacagagtattgccaagccttattaagcagctgtttattgggtcagaatacacctgtcaggaaaatcatcggtagtgagcagtttcttcccgttaccagtaaatgtcggaatttcctgagtgcagctctgaaggatttagaggtgtcattcccagagattagcagggacctaatctgtgaagtgaaggtggaatgaccaggatggccagagccagaggaagaccacgaagccagagggtgccccgacagaggaaaagcggccggtgggttttagatcctcatttggccagagggaggcagctggatcggcttctccagagcctgctggctggaggttggctgtccgtggtggtctggttctaagtaggagaagaggtggaacttggagctgggcaccagctggcactgctgtgttcagagcatgggaggaagcagcagcagcagaatcccaggacccccaaagtgggagaagggctcccaggtgccttacaggtcacagtcgagggccttcttaaaagctggcccaaacctgccctttccttgcagcccaatggcctcaggagacagtgactcacgctgtgtccacctgtgtcatcctgtggacagctggaggtccacgggaacagctgctatggcggcggacacagccccgtccagggcccatggcagccccagctggctgcccgctccctcctgtgggcagtgcttcacagcggcagcgggagcactgggtgcagcctctggaaggtctggaaggtgcttgctttggggactcggccctggtggatccccttagcctgtggtatgagctcagtccccatttctcaggtggccttcaaggctcattcctgactcacccagcctcatctccagccattcgagatgcaggcgttgtcattccttgaaattctcacgccttctagatcctctgtgcttttcatcacactatttcctctgcctggaatgtctgtctttgcctgggaaacaaaagagaaaaatgcctgactgttagatttaaaatagcatctcaaagctcacgttatttttaaatatttcaaacacatagataagaatagagaataacataatcccagtgctttgggaggccatggctggaggatctcttgaggccaggagtttgagaccagcctgggctacacagcgagaccctgtctctatgccttccccccccaaaatagggaacatattgaatgtccggcattagcgttatcagatcttactgctatgccgtatgtacttcaaatctcgttttattttaaagaatgaaacaataaagatttagctgaggcgctcagggtgccctttcccactcctggtctccttccttgcaaaggataatgtctacccttgtgttaactagcccatgtatggtgttctcatttgagctagatattctacctaagaaatctaaacacatacattgtattggactaataaaaagttgtatgtaaattatatattgtgcatgaccagcaattggccttttcactcaatatgatgtttttgaaatttattcaagttgacacatgtatagtattagcagctgcatggtgttccattgtatatatatgtggttttttgtttgtttgtttgtttgtttgagatggaatcttgctctgtcgcccaggctggagtggagtggcgtgatctcggctcactgcatcctctgtctcccgggttcaagtgattctcctgcctcagcctcctgagtagctgggattacaggcacgcaccaccacaactggctaatttttgtatttttagcagagacggggtttcaccatgttgctcaggctggtctcgaactcctgacatcatgatctgcccgccttggcctcccaaagtgctgggattacaggcatgagccaccgcgcccagccatatgtggtttatttacttctcctatggatggacatttcggatttttccctcagttacctacagtgctgctgtgtgcattcttgcatatgtattcttttgcacctacatggaagttctctgatatattcagaggagagaggaggtaaactgtcaagtcataagttgtacatgtcttcaactttacaacttatcaccaaattgctctccaaagtggctgttccagttggacatgcccatcctgtttctcccttgccaatacttgtctttatcaaactttaaatatttgccaatcacatgggtgagaagtgctatctcattgttttaacgagcatctccctggttcctggtgagattgaccatctttgcaaatgccagttgtgtttccccttccatgacctaaatgttcacatcctttgcccatttttccatttgatgcatatgttgtccctactgatgtagggtatggattctatatatatacatacatatatatatatacacacacacacacacacacacacatatatatatacacacatacataaaaggatcttttgttggctatgtgcataacgtgtttctcctcccagtctgtggttggtcttttcacagtgtttaaagagtctttttaaacaaaagttttaacttcaataaagccaaatttacccccattcttctgtattgcttatgctttttgagtggtttatctaagaaatacaaactccatctgtaataaaaatacaaaaaaaaattagccaggcatggtggcacacgcctgtagtcccagttactcgggaggctgaggcaggagaatcgcttgaacctgggaggtggaggttgcagtgggccgagatcatgccactgcactctagcctgggcaacagagtgagactctgtcttgtaaaaataaaaaagaagaaaaagaaagaaaggaaaggaaaggaaaggaaaagaaagataccctttctatagccttctattttttatttttcccttttttgacttttgagacagggtctcactctgatgtccaggttggaatacagtggtgtgatcatggctcactgcagtctccagctcctcactcaagcaatcctcttgcctcggcctcttgtcctgttgagtagctaggactacaggcatgcaccatcatgcctggctaatttttatttatttatttattttttgtagagattgggtcttgctatgttacccaggctgatctcgaactcctggcctcaagcaatctttccaccttagcctcccaaagtgctgggattgtaggagtgagccactgtacctggcctccttttatatttttttctaaatatcattctatatgttcttctaaaagcccatttgttccattactctgaaagacaatccaagatacgtcagagtctcttcttgggaaatatggaatgacgtcttgcatattgtcatgatatgtagtgggtgggtaaaatccgtgaaagggtgagtattttgcttttaaagttctgtgactatgggatggcactctaagcttcagctgcagttgggaaagacttttgctgtagaccaattttattgtacttagtcgagttctagagggagccaggcccagaaaatgagggggacatttacgtcatggaacacagaggaagactcatgaaatggcaagagaccctcccctcccctgacttccaatgtgacacccgtcttctctgtcctctctcttcatactgttgtcttaggtgttccttgtaaccagacttcaaactatctgaaaacgtttgtgagaaggaacacacagacacgcacactcacacacacacacacacacacacacacacacacacagaactgctttggacttggatacttcctagtcctcctgttattcctatgaacgattccttctgttcttctaagtcccttctactttattcagagattatcatcatgactgctcatgatggcagtcagtttatccagatcacaagtcagaagggtgaaatcggctgaaaagaggatgaaatgttttaaacgctcaagaatttccagtcaccacagtcctgaggttcgttgtttcttttctgtctgaaagctgtagaactccatgcagggagcctgtgagcctcggtgggctgatgaaacactcagaagaaaaaagaacttgatggaggcagttgcctgtttagcagacgggatctgaatggaaggtctgagggtctgcagatgtcagagctgtccatggctttgcctggtgtctgtctgagcgatctggcctttgtccctgatgcctaatctgcctgtttgtctctctgagatagccaccaggtggtctactgatgatcaaagccctcgatggtgcagactgctgtcacccctcggctgagtcccaagatggggagtttgagaatgccgagtcttgctgttgccctttctgaatggggtgatgcctggtcagatttcagtttcctggaacatgtgttaatggttctcagcagagggtagggctttatttacacacctggctcagtctagactgcagacctttcaaaggtttgcagagcggccgggcgcagtggctcacgcctctaatctcagcactttgggaggccaaggtaggcagatcacctgaagtcagcagttcaagaccagcctggccaacatggtgaaaccccatctctacaaaaatacaacaacaaaaaaaattgctgggtgcggtggctcatgcctgtaaccccggcactttgggaggccgaggcgggtggatcacgaggtcaggagttcaataccaacctggccaagatggtgaaactgtctttactaaaaatacaaaaaagccgggcgtggtggcgggtgcctgcaatcccagctattcaggaggctgaggcagagaattgcttgaacccaagaggcggagattgcagtgagccgagatcacactactacagtccagcctgggtgacagagtaagactccgtctcaaaaaaaaaaaaaaaaattagccaggcatgatggcagatgcttgtagtcccagctactcaggaggctgaggcaggagaatcgcttgaacctgggaggcggagcttgccatgagccgagatcgtgccactgcactccagcctgggcgacagagcgagactccgtctcaaaaaagaaaaaaaaaaaaaaaaagaaaggtttgcagagtaactttgtgtggctttcttgatcaactgtgggtggacttaagatttacagccgaataaaggacttaaaaatacagccctggaatttttgcctcttcaaatgtccttcttgaaaagaacccctttcagaaagttccactttttaggtggagccccctgagccaacgctctgctcttcggaatcattgatctgtctggggatgagcaatgctgttgtcttcatcatcctcgtcttcagcagcatcaacagcaaggtgaatatttagctggtacacatacaggtggccacaccactcaccacctgttaaaatattgagacactgccacacgtgttggtcaagagctgctgctctgagtcccagtctccccaccacccaggccctgcctctgggatctctgggacctccccacaaatcagcaatgaaagcgttggcacctgaccccacagtgggtctccagggctctgctcagcactccagctggtttatattctggtaggaagacagacacccacacacccactcccatagtcattgaggaatccattctgattgatgcccatgccacagagttgttaaatatcgtgaatttcaagtcatcctaagacaaaaatctgggctcttttctttggttagaagacaaaggaattccagcgtatgcagagctgtgtactgggttctttggagacattataatatatatagatgggccctgaaaggcttgcttgtaagggcagaacacacacacacacacacacacacacagacacacacacacagacacagacacacacagacacagacacacacagatacagacacacacacacacacagacacagacacacacacacacaaacttaaaaaagcaacatgtcaccacattgacactgatgtagattgtaagtgcagaggggccagagggtaaagatctagacagattgttcagagtgtaaatcacttagttttctgtgttcttaacagtgcctgccactgtggctgcttaggatttcttttctttttttaatatttaaaattttggctgggcatggtggctcgtgcctgtaatcccagcactttgggaggccaaggccggtggatcacttgaggtcaggagtttgagaccagcctgaccaacatagtgaaatctcatctctactaaaaaaaaaaaaaaaaaaaattagctgggcgtggtggtgctcacctataatcccagctactcgggaggctgaggcaggagaatcgcttgaacctgggcagggaaggtggcaatcagccgagatcctgccaatgtaccccagcctgggcgacagagcgagactgcatcttaaaaaaaataaaaataaaatttgagatgcttggaggaatagaaaattggtgaatgtttgaggcaggacgtgctaacgaagagaagaggctgacattctgcccgagaagcagggcacgatggcgtggcagccctgggctgtcgctggagcgagcttgtttatggaagtaagaggaagtgggcccgagggatgcagagcagacttgcagggtcctgaaggctggaaactagattttgggtgtattaggaaaatcatgaagacatgttgaagaactatcagccatctcttaaactagaaggcaggccttgccccagaacaattaagtcatctgtttggagaagagggaacagagaggagcctcgtggcctcaaccactattttatcgtgacattctgcagaaatcctggccattttttcttttgctctctgtacctttctgaacttctctgcagggaagtgttgcagcagatgccctcagctcaccagagcccgtgttagccctggttccggtcctcagtctcactgggtgataagggaagatgagggaaaactacttctatcagtcacagcaccaacagtgccaacacggccgtgcacatccaaatggcttcattatgctcaacagcctgggtgagtctgagccttacagctaagatgcattgctttttttttttccctcggtgtgataaaaatgctggtagtatacttttataccccaaaataactgagcacattgagaaagacacggcgacctacttgggaacttcagcagtattagctggaacgctgtctggacagtggaaggactttttgcagggagctgccgtcagaggactgagagccagcgttcagcacggcatcactgagggcgcctggcatgcctccgcctgcccgtgagaaggcacgcttaccttctagatttctcacactcctccagagttgcattctgcttccgtaactgtcctagaacagcatttcctgtatgaagatacacaggtttggccagagactgaactctggttacttcctgaacttgggaacaatcctcaccaaatccactaactattaatcatggtcacagacactctcttgcttttgcatgctctgctgtgatgaagattgttgacgccaagaactaaatcgtaatgagcccacgtgctcttcacagcaggctccgataacactttgtcgcttttatggttaaacctcctcgtaaaatctctctttaagcgaacacgtgattatccccacggtagtttaaactgaacttgatttgtgagtttatttcttcttttccatctgagatgtttgccaatatctctgacatatattctcctatggaaatagccagaaaatgatggatcgaggaaatcaagtgtaaatcagtctgtacctccgagtggaaaccagtcagtgggatgtgaatatacttaatatgttctgttgtcttgtgtattgaaggagccttcatggagattttatatctctggagaaactcctgcaggttgcctttttagagagaggtttgaaataagaacaaagaaagtgagttcgctttagctgagtaaggcagggggcaagtgaagcagtgttagaggaggtaatgtggcagctgtctataacaggtggagcaaggtgatttttgtgtgtttgtttgtttttggtttatttttgagatggagtcttgctctttcgcccaggctggagagcagtggcatgatctcggctcactgcaacctctacctcccaggttcaagcgcctcctgagtagctgggattacaggtgtgtgccaccatgcctggctaattttttgtatattttttagaagagacagggtttcactgtgttagctgggatggtctcgatcttctgaccttgtgatccgcccgccttggcttcccaaagtgctgggattacaagtgtgaggcaccgcgcccagccacaagatgagttttaatggccaaacagaattcctgtttcacaacaattgacattgtgtcggctcccttgtttgtgcatatgtgttaatctattttttttttttttttttttttgagtctcaccttgtcgcctaggccggagtgcaatggcatgatcttggctcactgcaacctccacttcccgggttaattatcctgcctcagcctccctagtagctgggactacaggtgcccaccaccacgcctggctaacttttgtatttttagtagagatggggtttcaccatggtggccaggctggtctggaactcctgagctcaagtgatctaccttcctaggcctcccagagtgttgggattacaggcgtgagccactgcatcaaaatgcaatttattttggatactgaatgcacagaactgatctgggaagcattgctttgttttggagtttgtccaggacaggttagaataatattaacatttgatctgaaggcaaccttacctagattatctataaattgttataccacgagacagaagaaatcctattttcccacttaatatctgtgttaaaaattatcctccaaatatctatcaaattttaaaaattatgaaacatattaaaaaatttaaatctataggaaataatataacatgatccgtgtagctttcatgcatatttagcatgttgacatactttcttcagatgtgttttttaatagaaacattattgtcgaaggcttcttatttccctcttctttccatcctgttgcactttctttttccttagagataaccaaaattagcctcctacatacttttatgggtacctacatctctttgtaggtaggcgtattatatatagtaaagtacaataccgtatattttgtatgctttaaaattatttaatatggtaagatgctccacatatcagttgagaacttgacagtttcaagatttatctatccatttggtttatttgaactgtggtataactttctgatgaatgactgtaccttgatttacttagcttttcttcctgtgatggacactgttacaagcggtgctataataaacttgtgcaagtaactcttcatacctgtcttggtcatgtaatgtgctggctcacaggacacatacatagtcttcagcttaactagatgttgccagtttgttctccaaaatggcttctctgcaaatctcactaccattccatattttcagattctaaaatcctgccatcctcagatgaggataaaacgatgttttcttgttttgagatggaacatcttttcatagttttattgaccatgggagttttctcttttaagaattgcctattcattttctttgcccgtgttttttctcattgtattgtcttatttgtgtccattattgtaattgaattttaggatatttgaatgtaaatcttttgttatcgtattgggggttcccaagaccacttctaggctcagtaactcactaggttgctcaagaggctcagcctatagtcctactcacagcaaagacttattacagtaaaaagatataaagcaaaattagccaggggaaaaggcacagagggtggagtccagaggaaaccacgtgcaagcttccaagagtcttctccagtcacataggacacacttcgtttccccagcatcacattatgacaacaggtgtgaagtgtgtctaccaggaaagctcattagagacttagggaccaaggtttttgttgggggctggttatataggcaacctctctgccttgcctgtacccaaattccagattctcagaaggtaagcaggtgtttagcataaaccacactatttgtacaaatatttaggcacagtgagtcactcttaccagttctaggaatggtaggaaccctcctgaaatcttaagttctcagatgccagccaagagtcaaccttgcaggcaggtcttctaactttctaattttaacttttctctgcacggttatgttcatttcaaatatcttctcctaatctgtgtttatattgtcttttgctcatccagcagtaatatctgtctttttcaacgctttataattttaatatcatgcaaaaaaatccttgcctaccccattcataaaggtagctccttatatctttctctaataattttaacacattcctttttgtatttaagactgtaacctaactggaggttatttttgtgactggtaaaagatatgaatctcatttatcatttttggcatagaagtagccagttgtttctgcactgtttattgaatggtctatcatatcctcatggatttgtgatgcttcctctggcataccaagttctcctgtttgtgttatctatctctgaactaaattccacaccatttaattgagtttataaatcttaatatttaatagcataaattgtcccctgccttgtcttattgattcttggctcttatgactggcttgtcaagttctgccaaaaatatatatatatggttaatatatattaagattaatgtatatgaatttttctgtcagaattgcttggaatttttagattaatgtaaggataatttacatctttacaaatatctggtcttggcttggcctggtggctcatgcctataatcccagcactttgggaggcagatcacttgagcccaggagtttgagaccagtctgggcaacgtggtaaaaacccgtctctgctaaaaatactactaaaaatacaaaaaattagctggatgtggtggtgcgcatctgtagtcccagctactagggaggctgaggtgggagaatcacctgagcccaggagtttgaggctgcaatgagtcaagattgcacctctgtactccagcctgggcaacaggagtgagaccttgtctcaaaaaaaaaaaaaaaaagaaaaaagaaaattggttttcccatatatgaacatattatatagctcttcattcatgtatgttttctttattacctttcggtaaatgtttatattctccataaagacattaacatgttttgttggaattcttcttaggtactttagggttattatttgttactgtgaatggattgttctttttaaaacttacattttctaattgattgattgctgttgacctgtatgggtttttactattaatgagatatataacaaactgaactcttttattaagtctaataccttgtggatcctcttgaatattccatgtagattatcatgtctgcaattatgactcttttgtcataattgcagataatatgtctgcaattatgactcttttgtcataattgcagataatatgtctctttctttttaatcctaattcctcttattgacttttcttgtcatattcttctagctagggtctctagaaccatgttgaatagaagtaatgatggtgggaatccttgtcagttctaagttttgtaagggactgcttctatcacttagccattaagtatgatgttcactgtgtgatatgggtacacatgctttatcaaggtcaggaaatttttgtcccagtttgctaatattttttaaatttcataaatcagaattgaattttatgaaatgttttctctacatccattgaggtgataatttttttcttaattttttttttttttttttgagacggagtcttgctgtgtcgctcaggctggagtgcagtgacatgatctcggctcactgcaacttccacctcccaggttcaagcagttctcctgtctcagcctcccgagtagctgggactacaggcgcccaccaccaagcccagctaattttgtatttttagtagagatggggtttcaccatattggtcgggctggtctcaaactcctgacctcaggtgatctgcccgccttggcctcccaaagtgctgggattacaggtgtgagctactgggccctgcctcttaatatgttaatgtaggagttacattaagagatttttttagtgttaaatgatttttatattatttgcatcaaagatgctttggtcattattattattttaaaatatattgctggatttgacttgctaacatttcatttggaagtttcacatctgtttgctagtgaatgtggcttataattttcttttcttgcactcccttcatttagtttggtttcagagtgatactagctttaggaaataagttggggtatgtttcctctttttctactctctgaagagtttacgtaagattggattaatacagtttggtaggatttgtctctaaaggcatttggacatggggattattcatgtgtcaattttgaactactaacttaattttttaaaatggttataggacttttcagtttttatatttattcttaaattatatatagattaaaaaattttgttttaaattttcctgtctatagactttgaagtcctgctttttttttttttttttttttttttttgaaacagagtctcgctctgctgcgcaggctggagtgcagtggcgcgatccctgctcactgccagctccacctcccgggttcacgccattctcctgcctcagcctcccgagtagctgggactacaggcgcccgccaccacgcccggctgatttttttgtatttttagtagagatggggtttcaccgtgttagccaggatggtctcgatctcctgacctcgtaatttgcccgcctcggcctcccaaagtgctgggattacaggcgtgagccactgcacccagctgaagtgctgttttttttctttaacattatgggcattttctagatcattcaatatttactgagaagatgacctgtaacgcattgactttagcagtagtttttctttctgattaactttatttctagaattttattaggttgcatatgtcccatggatagggtggcataagtggccgtgctgggcacatggtagacatatagtaatttctgctggatatcgtacccagaactactcaggcgttgtaactttccagagcaaaaaattggaatttcctcatgttttacagggggagggtaaaggcgattctatgaaaattaacaaagggggttgggggaggagggctttcctttttgctaaaggaaaaataacacattcttttcgaatgatgacttatttttgaaaggcatcctggctgaaatgatgagctcaggttttgggtctgagcagttcctattgaaagatacttgtggagatttccaaaagtgcatataagaatggcaggttcttagttctgggggaagagtgactggggaggaaatacgtcttccccttttattgatctcagttacgtgctatgacatcacatgtaattttttgtggagctgttctgatgccccacatgaggcccgtgtcctttgctgccagtgcattccaagagggctgtaccctgggggctatgcaggcagctattcttgtgtgggcttttgccatgcctgtttcaggtttggaactgtatacctttcaggagcatggcttatgacatagcaattccattttcttaacaaaaacgaaccctatttttactttaaaagtaaacattccctctgctgtggtttgaatgtgtccctgaaagttcacatgttggaaacttcatcctccgtaacagtgttaagaggtgagacctttaagaggtgattaggtggtgaggactcgccctcatgaatggattaatgtcattatcttgggaattatcttgggtttctgataaaaagatgaggttagcctccttctcttgctctctcttgttcatgtgatgccctccaccatgttatgacccagcaagaagaccctcaccagatgttggcttcttgatcctggacttcctagtttccagaactgcaaagaaatgagtttttgctctttataaattacccagtccaaggtattgtgttatagcagcgcaacatgggccaacacaccctctatccatctctccaccggccaaaatcaactaagtgtccagcttcattacagccagtgtcctttggaggagaagtctctgaacattcctgttgagattcctgattggagctgtgtgaaacccatttagattgaaatcagaaacatggtcaggttgtgagttttccttttggagagccctcccttattttcacatgctcattctcaaaagcactttgtacatcatgtgatttgtatgttttttgcttggtacgattacacagccctttacaacccactgcccacacatgagctgacccagtggcttcgtgctgtaaaggcagatccagaaggcagtgctgccaggctctcttacaaaaatcagtttgtcttcttttgagatattcctgttctgagagttaaaacaaactcttgaaggcagcagtatattatagatgcaaaatctcacataaaaaccatttaagaaaatctggggacatggaaattgtttttttccctttaacaagatggtaccactaatgtattcttatttttttgcccagagagtagcaatttctaaattgttagacatggttcttctttggtttcacataacccattccttcatggtacttaaagttagtaaatggttgaaatacttccttgagaagtagaaatgaggaagcatgaagagattaaatgagtcacttaaagccactgtaaggaagttttccttcctttttattggtttctgcctttggtgttctgctgcttaccctccctccttcctacctgccttgtgctggaaagggccgggatttgggtatgcccttctcagctgtgtgacttcgaacaagctatttgacgtctcaaggtcttacatttctcatctgtaaaatctaagatccttctcttcaaatggctcccaggtcacccctgctgcagaccaggaatatggctaacattttgggatttgacatcaaatcctgagttgactttacgtaacctgggtccatgacatgtactagctgcaaacaagaagctgatgtgcacattgtctcaggacacctggaagcaaaatgttgaatgttagatttagaagggaccttcatcttccctgagtccaacagccccatcgtccggatgaggaagctgaggccaaggttagcccttgagggctgcagtgctgaggtcctgtgtccttgcccctggccagtgctgctcagccttccccacttttaggagagttggttgactttttgtaagacccaggtgggtataaaccaacaataacattctgagctccccaaccaactgaatggacctctcctctccgcgaagggcattctaaagtcagcctgaaatgctaatccaggcggtgatgggaatgggctgtgggacgtgcctccattacagcctcctccccttggaattcaggcacagctgaccagcattcacattaaaatagagacttcagactgacaaagcggactctttgtagcaatgagataccaacttgacagatagccggccccaaaagaaataaaagtattttgcctcaaaatatatttctttgatgtattttgaaatgtccctgcaaagctgtctcttgtggggaaaatctacattctgtggagaatctccttcccttcccaggtctttttcctgatccagtagagaattaactaagaatctggcactttttgaagtctgataagaaacatttaccatctattctctccaaagcctgctacctggaggcttcatctgcataataagaaccttggtttccataaccccttatcttaacccagacactcccttctattgattccaggtctttagataaactcaaccaattgccaatcagaaagtgtttgaatccacctgtgaccaggaaccccctcagcaatcctctgagttgtcctgcctttcaggaccaaagcaatgtacatcttacatgtattgattgacctcttgtgtttccctacaatgtatacaaccaagctatagcccgaccacttgggcacgcattctcaggatctcctggggctgtgtcacaggccacggtcactcatatttggctcagaataagtctcttcaaacattttacagagtttgactccttttgtttacatgggattgacagatgatatcccctgcctcgagggaatacgtgtgtgggcatctgaaatgtcatctcagctcacctctcaatgagtgggaagagactggaacacttttctccatggtccttgaatttttgtcgttaaacgagttactcttcagggcccgtcgtgtgaaaagctttgctgcacatcagcctggaggaaggctggacaggagaaatagcttcccaccaaagccctcccgtgtctagaagcatcacagtggcccttgcttaggtggcagaggacaggggtagatatttgtgatcaagaaagttggtcaggccgggtgcagtggctcatacccgtaatcccagcactttgggaggccaacgtggacgaatcacttgaggccaggagatcaagaccagcttggccaacatggtgaaaccccatctttactaaaaatacaaaaagtagctgggcatggtggcacatgcctgtaatcccagctactcgggaggctgaggctggagaattgcttgaaccgggaaggcggaggttgcagtgagctgagatcatgccactgcactccagcctggtgacagagtgagactctgtcttaaaaaaaaaaaatgttgctcagaagcttctcgatcttgtcacattctccggtggtgagttgagagcagcccaggcctggggtcctagggagcttgacgtggctactgttctagacagtgctgagtttgtcatcaccttgctttcattatgatttcctcctcctcgtcaccacctacggtgtttatggagttcgctgtacatgaagccccagcgtccagaggtgtaagacagagccccttctaggagctgctgtccatcccactgaaaggcaggtctgacacagaagagacaaacaaccatactgggcctctggggccccgtgagatgtgaacttcaggtaccagagtgcatgcgggaggaggcctgggtgccctggggacccaaagcaggagctcatttctgacctgcctctctcaccaagcttcctttgctgaatgccgtgggcaaacagtggtgttggtattggagcaggatcaaagctcattcctggctaacctgcaaaaatgagcaggtaaacaaatgggatccataaaatagagactaaaatgaaagtttgtcttactgtgattagcaactggcccctttccaaattccacctgctctgcgtggagctgtggcgtctcattccaagagccttctcacagcatctgacccgggcctggggtaacagtacactggggtttgccaaggataaccatagcaaggcagctacaggagcacagcatggtgggggggcatgaaatcagaacaagcaggacccacgggcgggggtgagagcaagtggctgggaggcagaggcagaagtgatggctgctgactcaccgtgtgtctgccaggttgcttaacccatctccgctccggttttcccatgcgtgagccctctgcagtgtgtggcatgctgatcggcctctggcatgaagagtaaaagcaaggccacataaaaatcacaggtgcccctcgcttcgtgcaacatgtgtgccagtccagtttctgcaacagccccccaggcgctgagcctgctccatgggttgggagatgttagacctcaagctgtgcccctagctgggtgggtatgggaagttacatggcagtgctggctgcattctgcttatcactgaaagaagtggctttggaatgggtgatttcttaaggtgtttccccactcagttcttctgttcatttttgtacattattatctcttcattgttgtacatttgttggagcttagccccaacagtgcctgcctaggtggtgcggactgaggaatagagatggagtaatcatgatatccaatgtcttatctcactggcctccccgccccaccacatcccttcccattggacggtgaggactgaggctccatcgctgaaatgcacacgtgttaccaggcagggttgtgagggccagttcaatgaacataaatacccttgtcagatcagttgtcatgattctagagaataaggccggaggaagtgagcatgctgatactaaagaacaggggagagaatactgggtttggttgtgcctggtcactaaaagcaaacttcacccactgagaacctgctagtcaacctcctatgatgttcagaagcctcttgaatgttgataattaatggacagggtgagcttggccaggcaggctggctcatgcctgcagtcccagcactttgggaggtcaaggtgggcagatcgcttgagctcaggagttcaagaccaggctgggccacatggcaaaatgctgtctctggaaaaaatacaaaaaaaattagccagatatggtggcatgcacctgtagtcccagctccttgggagggtgaggcagcaggattgcttaggcccaggaggtcaaggctgcagtgagacaagattgcactgctgcaccccagcatgagtgacagagcgaggtcctgtctcaaaaaaaaaaaaaaaaaaaaaaaggtgagcttttctctactgagtttcttgaagtgtggcacaactgaggcatagcatagtgggacaggatgctgttcatttatctgagaggtgaaaggatgtacctcctgctgcttttttggtgggatggggtcggaggagagcctgatgagccaggcaaggagaggaggtaacagaacactggtggagttgatggtgagaagctggactctctcagtgggctgtttgcctgcccctcccttcatttcccataggcttcggtagaagcgtggcctgcagaatcaggaaacagtgctggttaatctgtaagtatgcaacattcttgggcctttctgtcactgaagagcataatgtaattcaggccagtgcagtactgagatatggagtgtggccagcacccatggcaggtgcttggaggtttatcctagtctttctgctaacttcctggcccaagtgcaggtcacttaccttttctgggattcaggtacctgtaagaagagaagtgagtgtgttggactccctctagggaactggaaggaataagcaataagtatactttgacattttataaatagaacatgtttaatacatgcatttcaacgaggcctataggattaacaactttggaggcatgtgtaccggtttgcggtcagtgctcacaccacctggtggaatttccttcctttgactggcaggaagagggaagtacttctcacacatctgttaccttctgccaagtgtaaatgtcatgctggcatctgtgtcttaattgtattggcattcccttgtactgggcctggatggggtgggtgctcaacccacacagacagaaccaagctcccgactgcagacacacatcattaagtttctggacttcagccacagtatctttgttattagattattaactcaatagccttcttgtcttttagcctaggactctggacatagctctctgtagatgcttattgatgactgattggctaacagatgcaatcacagagtcacagatgtcaactcttgcctgtccttccttcctttccttcccttccttccctccttccttcctctctgtctttctttcttttctttctctctctctctctccttccttccttccctccctctctccctgcttccttccttccttccttcctccgttccttccttccttcctctttctctctttctttctttcttttcttttttgatggagtttcactcttgttgcccaggctggagtgcaatggtgcaatctcggctcaccgcaacctccgtctctcaggttcaagcagttctcctgcctcagcctcccgagtagctgggattacaggcctggctaattttgtatttttagtagagacagggtttctccatgttggtcaggctggtctcgaactcccgacctcaggtgatccgcccaccttggcctcccaaagtgctgggattagaggcatgagccaccgcgcccagcttgttcgcgctcgcttgcttgcttgctttttctttctttctctctctctctctctctctctctctctctctctccctccctccctccctccctctctctccctctctccccctctctccctccctccgtctgtccctctctttctctcgttctctcttttctttctttctctcaagacagggtctagctgtgttgcccaggctggaatgcaatggcgtgatcatagcttactgcagcctctgcctcctgggctcaagtgatcctcccacctcagcctctctatagctaggactacaggcatgcgccaccatgcctggctagtttttgtattttttgtagcgacagggttttgccatgtgcccaggctggcctcagattcctgggctcaagcaatctacccaccttggcctctcaaagtactggggttatagacgtgcgccaccatgcccggctcaacccttgtatttcttgatggttttcacatgcagaagcccaaaatctgggagataccgatggcccctggatccaacactagagttatttctctccacagcagtttgcctcatgctcctttggtcactgataagtgttgttaacatttttcaaatatcctgtctgcactgaggtgtgacgagcacattattacctctgattcccatgctgacacacagatcgggcatgtctttgtgtttgtctttggagagccttatttttctcatgtgatatatacaccgaaatacacaggaatcattattgtacagaacataggagacagccactatgaaagcaactgtccggctgatggaagaaaagttcaggggcttctcattttgattacctgtgattttgctttgcatacaattttatttccttggtgagagctgcttcttccttgctgacttttaagagacattggaagacatggggcgggtcttctgaacatctacctgtgcgtcactttttaatttcttttccaggtagagtctgcagtgagggaatgagttctttttttgtttatttgtttgttttttatttttttttgagatggagtttcgctattgttgctctggctggagtgcaatggcgcgatcttggctcactgcaacccacaccttctggggttcaagcgattctcctgcctcaggctcccgaatagctgggattacaggcatgcacctccacgcctggctaacttttgtattttcaggagggacgtggtttctccatgttggccaggctggtctcaaactcccgacttcaagtgatcctcccacctcggcctcccaaagtgctgggattacaggcgtgagccactgcgcctggccaggaatgagttcttaatgagagactcttgagtctttctctggaagtagaatggaatttttagaaggatgaaagacagatgttcatttcacagagcaggctgctctattcacatgcagcctcaacaccagtgacattccaaccagtgtttagggtttagttagggagagaacttcatccccattagttcatatgtgtgtatgttaaagcacttagaaccatacctggcacataagaaaaattctgtaagtattcattgttcttgttattaccatcatccttgtaattcagtgattcatggcggggtgcagtcaaggagtgtcatgacaagcgaacttcagaagactgcatcagacttacaggtcactgcttttgtagccccagtacggtaggagaaacatccactgggaggtgggtccctcgttagccctgaagagtggattgctgatgccttctgcttcaccctctgcttgtgctccttcttccaagctgttaatttctctgaaatcttgtgtttctttacgcaggggttcacatcctgattgcttgttccactcggaagggaaggcagagggcttgcatctgaagccatgcctccttcatcagtgctgtatcgagctctaggtttgggttcttggcacttcggtgcttcccttctcactcagtagtcataatgttagcacggttgatgcattgacacgctctagtgagcagtttgcaggcatctatcatgaactgttcaaagagatacgcagatacatctcacaaacactgatggaatacttagtatgtgctaggagggcactagggagagaaagatgaaaggcagcgcctgctgttgatttcatttgcatcttgccctcaggactcaggttaattggtctaggagcttatagactattaggcttcctagaccccttgggagacatgggacttgccagacccatttccccaaaaaaggtaagcactgtggaggattcttctcctagagtctagcatccatcatttcaccagtgtggctgattccaaaaaatgcattttgacaagaagagaaacacagttagttaacagacgtcagaatgtgaaataactttggctgattggaggagttaaccggttcttttgtcatcttgtggtccgttctgtgtgtgtctgcttagctttctcacgctgagccttttccctcaggatcttcagcagttttttccagtatgtagatgattcaactcacagatggcagcttctaagttattatgccactgattaaagaattgttaaggcagacttatttctctaaatacaaacacatgcaaaactgagattttgaccaaaactttgctagacacaatagtgtattgtttctctcttcaaagtgtgttccatgatagacttgtgttttataaaacagcagtgcttggcatgtatattacgaggtctatcaccaaagaattctaagctctttttaaaaagacatttttaaggtaaatgaccatttaaaaaagatactccgtctcttctatttttttcctttcttatatcttcagcaacatcctaaatgtgacaatgtacgtaaaacactactgcatagagtgaatgttcactaatgctgatgactgtctttattggtatctctaatagttggatttgtggttaaacatatatgcttcttgccccaaatgactacatctttgttttctgttcgggcaaacagagaactggagttcactgtgatctcttcactgttaacactatttaagtgttattcaaagaaaatggaaacttttggtctcagtgtcatgccaacttgttctagattattgttcttaaaaaaaaaacaaaacaaaaaaaaacagagccccaggctggatgccgtggctcacgcctgtaatcccagcactttgggaggctgagacaggcagatcacaaggtcaggagatcgagaccgtcctggctaacaaggtgaaaccccgtttctactaaaaatacaaaaaatagccaggtgtggtggcgggctcctgtagtcccagctactctagaggctgacgtaggagaatggtgtgaacccaggaggcagagtttgcagagagccgagatcgagcgactgcactccagcctgggggacagagcgagactccgtctcaaaaaaaacaaaaaaaaagagccctggccaggcacggtggctcacgcctgtaatcccagcactttgggaggccgaggcgggcagatcacaaggtcaggagatcgagaccatcctggctaacacggtgaaaccccgtctctactaaaaatacaaaaaaaaattagccaggcgtggtggctggcgcctgtagtcccaggtactcgggaggctgaggcaggagaatggtgtgaacccgggaggcggagctggcagtgagtggagatcttgccactgcattccagtctgggtgacacagtgagactccatctcaaaaaaaaaaaaaaaaaaaaaagttgagaaatacggagagacttattatgaagcaataaatagttatgacacgatgttattaacactgggagaaacaaatagaccgatggaacaaaatagatagctagaaatagacttctacgtaaggaaacttggttatgcagataaacattgtggacaagtgggagaaggaaggattattcaataaatagtgctgagacaacttaaaaatcatattttcaagaggttgcaatgaaggtcctcacatatcctatatacaaaaaattagtttgaagtagaccaaatacatcaatgtgaaaagcaaattctaaacagtttagggaagaatataggaagatattttcatgagtggtgtagagaatgactttttttttttttttttaaagacagggtctcactctgtcacccaggctggagtgtagtggcgtgatcagcgctcactgcagccgtgacctcccaggctcaaatcgtcctcccaagtgatcctcccacctcagctaggactgagactagctggggctgcaggcacacaccaccacacctggctgatttcttttgtattttatacagagatggggttttgccatgttgctcaagctggtttcgaactcctgagctcaagccgtctgcctgccttagtctcccaaagtgctaggattacaggcatgagccaccctgcccgacccaagaatgactttttaaagcataagcaaaaagcataaaccatgaattaatgattgctaaatttgactgtattaaacaaagaatatcagtttatcaaaagacaccataaagtaaaagagatccacaaacttagagaagttatttgcaatatatataactgaaaaaggatttgtatttagagtatgtaaagaactattaaataagaaaaagatactcaaaagaaaatgggcaaaggacttgaacagggattttagagaaaataggaatagttaataaacctatgaaaaggtacctaatcatcagaatttaggaaccccaaattaaagccataatgatataccatttgataccaaccagactggtgaaaatatgagtctgataatattaagtgctgacaagggatattggtcagtggaaattctcatacacagctggcaggactgtaatttggcacaacttttgaaagcaatttattcttacctctattaccacacagttctgccattccactcccaggaacagaccctggtggaaagagaataagctttggagtcagtccaggatttgaatccatcttttaccattttcttttctttctttctttctttctttttttttttgagatggagtctcattctgtcacccacgcggagtgcagtggcgcaatcttggctcactgcaacctccgcttcccgggttcaagcaattccctgcttcagcctcccgattagctgggactacaggcgcctaccaccacgcccggctaatttttgtatttttagtagggacggggtttcaccatcttggtcagcctggtcttgaactcctgaccttgtgatccacctgccttggcctcccaaagtgctgggattacagatgtgagccactgtgcctggcctgttttaccattttctaattgtgtgcccctgagcctatgactttctcagttcccttatctgtacagtgagagaatgttgtgtttagtaactgaaaattcatggcatatagtaaacctcactaaatgcagacacttttattaacatgtgactgaagggcaggccccctgtgggcctggtcttatccttatcctttttagtatatgcacttcttctccacagtgcatatgctaatactaggtattcaagaaagcaaggtttgatttggatttgcagtgtctcccctaaatgctcagctcctgctatatgcatttcattctgcacaaacctcctcgccgcctgccacatctaagctatgatacaaatattcttcacgtgtgaaattccttgctcactgcttttacctcactgtggccatcttctctactaagaaagtcagctgtggtatcaacacacaagaatgtgtgcagctggtagtgtatacattcagaataacaaaggttattacactgaaaggatgtgttttttctttattactgggcatcttaattgcttcttggatgttacaagcccagcattgcgaagtacaccgtagagcagaggactaatctgtggattgagttgaggcacaaccctgtgagtgccctttctcagtgcagcagtctcagaggtaattttactcttttctgaaatctcatttcttattttggtgtgtgcagaaaagctcaactggagttacctgcaaatgcaggcatatgtgatagctctgctcagccacgtattaagccacaagcagccaagaacagatactactggcgacagctaagtaatgcacacacacacacacacacacacacacacacacacacacacacacacacaaaaggagaaaagtgataaagaagcaagaattccaagtgagttacaaactccaaggacttggaacatattctgaggaattcttaaattgaggcttacgagtgagaatatataatgtgtctccttaaacgttttggggtgacagatatttctgggttgtgggtgatatttttagggagctttaaagaatgaattcaggagacttgcagcctgatgctggttgtctgggtattttgggacatttcttatagcccagctttttattgctcaacacagatttagaagcttgtcctaatcaccaggaagatccttaaagactggcaataaagacaggaatttcaggagccaggcacagtgcctcatgcctataatcctagcacttcgggacatgggggtggaaggatcacgtgaacccaggaggttgaggctgcagtgagccatgattgcaccactgcactctaggctgggtgacacagcaggaccccgtctgtaaagaaataataacaggcctggcgcggtggctcatgcctgtaatcccagcactttgggaagccgggccaggtggatcacaaggtcaggagatcgagaccatcctggctaacacagtgaaaccccatctctactaaaaaatacaaaaaaaattagccaggcatggtggcacacgcctgtagtcccagctactcaggaggctgaggcagaattacttgaacccagggggcagatgttgcagtgagccgagatcacaccactggactccagcctgggtgatggagcgagactccatctccaaataataataataataataataataataataataataataataataaagttttttttttaaaaattgggattttagaccaatgtgagggaagttagcagcatggccctgagaagccatgtttccagagtgcactgttaggactgctgaaacagtttaagtacagacatacaagtcagcacacaggaagcagagcccgggaggattagacctgacatttgaaccagtccgagcccctctgtctaggtatctcctccaatcctccagtcatccctggttaaatattttgatttcttttgttaatactgtataataattctaaatctttctgagccaacattaaggtgaccaaacatcctggtttgcatgggacacaggactttcagtgctaaaactgggacagttctgagcaaactgggatgcttggtcctagcggacaactgctttgtgtgtctggtacaggtgagccacagctgtgtatacatgtgtagtgggttgaatagggacccaccaaaaaaggtgtgtccacctagaatctcagaatgtgatctgatttggaataaaggtcttttttataacaatgacaacaacaaaatctaccctttcaactaattttaaagtgtacaatacaatattgttaattatatggacactgttgtacaatagatctctagaaatttttcatcttccataaccaaaatgctgctcccaccgaacggctcctctccccctcctcctcccacccaacggcccctctccccctcctcctcccaccgaacggcccctctccccctcctcctcccacccaacggcccctctccccctcctccctgctctgtggctgccaccattctactttctgctgctttgattttgactacattagctacctcatctaaatagaatcacacagtatttgtattctgggactggcttatttcacttagtataatggcctcaaggttcattcatattgtagtgacaggatttcctttttttgttttttgtttttttgagacggaggttagctctgtcgcccaggctggagtgcagtggtgtgatcttggctcactacaacctccacctcctgggttcaagtgattctcctgcttcagcctcccgagtagctggaattataggcgcctgccaccacgccaagctaatttttgtatttttagtagagatggggtttcactgtgttggccaggctgatctcgaactcctgatctagtgatccatccaccttggcctcccaaagtgctgggattacaagcgtgagccaccgcacctgcccccaccccctgccacctttttttttaaaggctgaataatattccgttgtctgtatagaccacattttctttatccactcatccatcagtggatgttcaggttgttcccactgttttgctatcgtgaacagtgatgcagcgaacatgggaatgcaaatatttctttgagattctgttttcaattctattgaataaatacccagaggtggggttgctagatcacatggtagttctgtttttaattttctgaggaaactccattctgttttgcatagcagcagcattatatattctcatcaacagtgaacaaggatttcagtttctccacatcctaatcaacacttactttctgctgttcttttttcttcttccttctttccttcccttccttcttcctttctcttccctcccttcttcccttccattccttcttcttttcccttccctttcttcttcccttccttcttcctttccctttcctttcttcttcccttccttcttcctttcccttcctttccttctttccttcccttcccttccatcttcccttcccctccttcacttcctttttcctttcccttcccttcctccttcccttcccttccctttttctttcccttccttctttgtttccctttcctttttccttccctttccctttcctttcctttctttttgtgtttctataatcatggccatcctaacaggcatggggtgatacttcattgtggttttgatttgcatttctctgacatttgtgatattgagcatcttttcatatacctgcttgtcatttgtatgttttccttacagaaaggtctatttaggtcctttcctttatgtattttaaaaattggtttatttgcttttgctattgagttgtaggaattccttgtatattttagatatcaatctcttttcagatagatggtttgcatgtattttctcccactgcacaggttaccttttcactctgttgatgctttcctttgctattcagaaggtttttcgtttgatataatctcacttgtctatttttgcttttgttggcatatccaagaaatcattgccaagaccaatgttttgaaactttccccctatgttttcttctaggaggtttgtagtttcaggtctacatttaagtcctttaatccattttgagttgaggtttatgtatgcgtaagataaggatccaatgcttcttttgcatgtgggtatctagttttcctagcaccactttgtgagacaatcctttccccactgtgttgtcttggcacccttgctgaagatcatttctctgtgtatatgtgggtttacttctgatctctctattctgctccactggtctgtgtgtctgtctttatgccaatgtcatactgttttgattacagtagctttgtaagatgtttcgagatcagaaagtgtgaaaattctagctttgttcttttttcttcagattgttttggctattcagggtcctttgtggttggttccatgtgaattttaggactgtttttttctattcttcaaaaaatgccattgggaatttgctaggaatttcattaaatctatgactcacttcaggtactatggacattttaacaatattaagtcttgtaatccatgtacataggatgttgaattttcatatatggactttattatgttgactttttatatatggactttattaagtcttgtaatccatgtacataggatgttgacttttcatatatggactttattatgttgaggcaatttcctttttttcctggtttcttgcagttcttataatgaaaggatgttgaattcagtcaaatgctttttttttttttttacatattttgagatgatcatattatttttatctttcagtcttttaatgtgatgtaccacattgattgacttttgtatattgaaccatctttgcatctctgggataaatcccacttgaccataatatattatctttttaatgtccttttgattcagttttgtattttgttgaaaatttgtgtatctgtattcatcagggatattgggctgtatgtagttttcttttcttgtagtgtctttgactttgttatcactataatgctagcctcaaaaaacaagtttggaagtgttcccttctcttcattttttaaggagagtttgagaaggattggcattaattctttaaatatttggtagagttctccagtgaaaccaccttgtcttagacttttctttttgggagatttttggttactgattcaatcccatttctagtaaaagatctgttcagattttctgtttcatcatgattcagtcttggtagtttgtatatctctaggaatttatccatttcttctaggttatctaatttgttggtatataattgttcactgtggtcttttattaatactttttattctgtggcatcagttgtaatgccccctcttttatttctgattttatttatttggaccttttctccttttttcttagttagtctgcctaagagtttgtcaatttttgccaggtacagtggtgtgtgcctgtagttccagctatttgggatgctgaagcagaaggatcacttgagctcagaagttcaagaccagcctaggcaacatagcaagacccgcccccttcatctctttaaaaaacaaacaaacaaaaaacagatcattaattttgtttttcttttaaaaaaatcaagtcttggtttggttgtttcttttttctattgtttttatattttctatttcatttctttcaattataatctttattataatttccttccatctgctaactttggcttagtttgtttttttctttttctagtttcttcagttataaagttgggttgtttatttgagatctttattcttttttaacataggtgtttactactataaacttctctcctagtattgtttttgctacagctcacaggttttggtgtgttgtattttcatttttgtttgtctcaaggtattttctaaattccccagtgattgttttctttgactcagtggttaagagtgaattgtttcgttttcacatatttgtgaattttccaggttttcttctgctattgattttcagtttcattccattgtggttgaaaaaaatgtggtatgattttaaacttcttaaatctgttaagtcttgttttgtgccttaacatgtgacgtatcctggagaatgttctgtgtgtacttgaaacgaatgtgtattctgctgcttttgggtgaaatgttttataaatgtctgttgggtccctcgatctgtagtgttcttcaagtcctctgttttttttttattagccttttgtttggctgacatactgtactctatacattattgaaagtgggatattgagccaggcacagtggctaacacctgtaatcccagcactttgggaggccgaggtgggcggatcacttgaggtcaggagtttgagaccagcatgggcaacatggtgaaaccctgtctctacttaaaaaaaatacaaaaattagctggatgttgtggcacatgccagtcatctcagctacttgggaggctgaggccagagaatcgcttgaacccaggcagcagagtttgcagtgagccgagatagtgccatggcactcctgcctggggaacagagcgagacttatctcaaaaaaaaaaaaaaaaaaaaaaaaaccccaaaaaacaaaagtgggatattgaaatctcctactattgttgtgttgcttcctatttctcttttcaattctgtccatgttttatatctttgggtctctgatgttggctacatgcatatttataattgttgtatcttcctggtaaattcactcttttatcattaaataatgttgtttctggtttcttgtggcagtttttgtcttaaagtctattttgtgtgatataagtatggtcatccctgctgtcttttggttaccatttacgtagactacctctctttaccctttcattttcagcctatgtgtgtttttaaatccaaaatgagtcccttgtagacagcatatagctgaagcttgtttttaaaatccatttagctactgtatgtcttctgattgagggatttaattcacttacatgaaaagtcattactgataggcaaggacttactattgccattttgctcattgtttttatctaccttgtagctcttttgtccctctcactgtcttcctttttgtttccctcatttttcttctagcaatgttctttgattactttttcattttctgttgtgtatcgcctatagatattttctttgtggttaacatggggattacataaaacattttatagttatattaatctgttctaagctgacaacaacttcagtcacatacaaaatctatatgcttttctgcacactttgttattgatgtcacaaattcatgtttttatgttgtgtatccattaacatattttacataattattttttatacttttgtctttttttaattatactttaagttctgggatacatgtgcagaacctgcaggtttgtttcataggtatacacatgccatggtggtttgctgcacccatcgatccatcatctacattaggtatttatcctaatgctatccctcccctagccccccaccccacaacaggccccggtgtgtgatgttcccctccctgtgtccatatatcctcattattcaactcccacttatgagtgagaacatgcggtgtttggttttctgttcttgtgttagtttgctgagaatgatggtttccagcttcatccatgtccctgcaaaggacatgacatgaatgcacctttttttatggctgcatagtattccatggtgtatatgtgccacattttctttatccagtctatcattgttgggcatttgggttggttccaagtctttgctattgtgaacagtgccgcaataaacatatgtgtgcatgtgtctttatagtagaatgatttataatcctttgggtatatacccagtaaggggattgctgggtcagatgatatttctggttctagatccttgaggaatctttatagtagaatgatttatgatcctttgggtatatacccagtaaggggattgctgggtcagatgatatttctggttctagatccttgaggaattgccacactgtcttccaaaatggttgaactaatttacactcccaccaacagtgtaaaagcattcctatttcttcacatcctctccagcatctattgtttcctgactttttaatgatcgccattctaactggcgtgagatggtatctcattgtagttttggtttgcatttctctaatgacctgaccagtgatgatgagctttttttcatatgtttgttggccacataaatgtcttcttttgagaagtgtctgtttatatcctttgcccactttttgatggagttgtttttttcttcttgtaaatttgtttaaattcattgtagattctggatattagtcctttgtcagatagatacagtgcaaaaattgtctcccattctgtaggttgccttttcactctgatgatagtttcttttgctgtgcagaagctctttagtttaattcgatcccatttgtcaattttggcttttgatgccattgctttggtgttttagtcatgaagtccttgcccatgcctaggtcctgaatggtattgcctaggttttcttctagggattttatggttttaggtcttacgtttaagtctttaatccatcttgagataatttttgtataagatgtaaggaaggggtccagtttcaattttctgcatctggctagccagttttcccaacaccatttattaaatagggaatcctttccccattgcttgtttttgtcaggtttctcaaaagatcagatggttgtatacttttgtcttttaatctgtataccagaattaaaagtgatttaaacactactgttacagtattatagtattctgtatttgtctatatgtttacctttggtagtgaactttatacttttatatgctttcattttcctatctagcatcctttcatttcatcttgaaagactccctttagtaattcttgtaaagtcagtctagtagcaaggaactcctctgcttttggttatttgggaaagtctttattcttggaaagtatccttcgttgacaggtttttattctttcagcactttgaatgtattgtctcacttgcttcttgcatgcaaggtttatgctgtgaagtccactgatagccttttaggggttctattgtatgggaaaatttgcttctcttttgttgctttaaaaattctccctgggccaagcacggtggctcatgcctgtaatcccagcactctgggaggctgaggtgggtggatcacctgaggtcaggagttcaaggccagcctggccaacatgggaaaacctcgactctattaaaaaattagccaggtgtggtagcaggtgtctgtaatcccaactactcaggaggctgaggcaggagaatcacttgaactcgagaggcagaggttgcagtgagttgagattgcacccctgcactccagcctgggcaacagagacttccatcttaaaaaaaaaaaattctccctgaaaagctagaactttgaatacatgctccaactcttttcctccccagggagaagtaaggagttaggggttttctcctgtttattttgtgctgagctagagggcatggactatgacaaataagtacatgctgatctaaaccatttcctttattctcagcatcccttgacctggcgccctttcctattctaaaccatcccttgggcagtccccttgaaaagcctggacattggactatgatccagtctactcttccccgctcccgggagaagcgaggagctggcagtttcctcttgcttacactgtgctgacctgggggagggactatggtgaatggatgccatgaatttccctgccagctttgatcatctggttttgcagcagcctgagatgcaggagcctcttaactggtttccgtatttctcacaaagggaagtagtctatgtatttttgttgaattgctgtctctgtagggacaaagagggtcttgcagttcctattttgccatgttgccgaagtcacttcctggaatgaaggtctttacagatgtaattaaggtaaggatcttgagatgagatcttcttagattagggtggaacctgatttcaatgataagtgtcatgagagacagaaatggaggagacacaaacacagaggagaaggccatgcaaaggtagaggcagagactggaatactatgtttataggccaaggaatgccaaagattgttggccaccagcagacactaggagagaggtgtggaatggatcctctcttaggctctccagaaggaactcactttgctgacacctttgattttggacttttggcctctagaagtatgagagaatgaatttctgttactctaagccagcaggcttgtggtaatttgttacagcagccccagggacatgggaagtgagtttgggagttttactacaaaaatctaggaggaggattttagacctttattggtcaatagccttatctatgtcttcactctctgtgagcccacctgtatctacggctgttatccacataggtgttttgactagggatttctgttcagtgaggtccaaactgccttcctcagtgccctggggcttcctgaaggtgctcttggtgccccctgcaggtgccctgtgggctgctttgtggggagtgtgcgaggtgaaggctgagcctgtgtggctccagacccctggcctcattaaccaaaacaagttttagataagttatttttagggggattaatataggattttgtttgaaaacaaacaaacaaaaaccacttaaaaaaaaagtaaaagaaacgtcctaaaagctacaggttgcattcttgccttctttctcttctaacgtgattctttgtgcagccattttctgccaatgctcttcttgggtgcagcagtgtctgcagtcatggtgactgggaagtgggaagggggcttggagtagaactgcagggaggatgggggttggaagaacccctggtgcatcaggtaaaaccacaaggaggtatgctgccctcattcttatccctgaatatctattgtagcttcttgtcccctttcatggtcaacatcttgcaaataatttcgtcataggctggtatctcaatttcactgacggctcatggcaaagcatggagggaaaaaattaggaaggggtggggtgaagttattaaatactgggagtgagtaaaagtgggcaggcaggaaaattattctaaaagggttaggggaaagggaggtggcataataacaaaaggaagaactgtacctgcattagagtgctataattttccccaagtattgccatagaaatcgcacttcagactctacaccatgcatcaatttgaggagaacaatttacctgtattgtttcccatgtgtcatcagcgtcctctttctcctgtttcagtcagcaggactcatttcatccattttcatctggtactgttgactattcatttctttgcactgattttgctgccaaagtccccttttcaagtcatggacattattaagtataccctttattttacatcacttgccattttcagaactcctttatttcattactttgcattcagaatttccggcctaaatcgatagccttgacataaaggcaggtctctgctttctcttttgggcatgaacagttcctttcctgaatcagaaatttatttttctttctagaagtctagtgtggggaatagtcagcatgcttactaagtcttaatttgttagaaggaaagatgaagataaatattggtgatgggggttccctagaaaataaattctacctactcctaccctcacacgtttacactctgcttttgatgcatctcttgtattctgcttttcctctctaaagaagggaaacttcttcctgggaccagtacattgggctcattagttccagccccagctctgccacacgcttgctgtttagcttttagaaagttagctcatctttctgttttctggcctatgaaatggagactcactgatctcttggatggatgaagtaccaagtaaccactatgggacttgcccccatgcaggagtaatgaatgaatcaatttcaaaacagctggacactaagcccacagcccaggctctcctcagattcattctatttacagcccagctttcacacaacgtgtctgatagccagttccttacgaagcctctgtcatgcttacggagcacgtgaccctcttgaaggagatggggaaggatcatggaatgttaaccactgttcccatgcatggaactgtgctaagaaatgtgctcccaggtagttttggagccatatgtgtctgaaaagaactcataattagctgaagtcaagggaaggggtcttcttatcactccttctgtattgttttaggcactcacactcatcagcagacagagtgcattcactttcttttctttccttttttctttctttttttttttttttttagagaggaggtcttgctttgtcaccccaggctggagtgcagtggtgcaattatagctcactaatgccttaaattcctgggctcaagcaatcctccagcttcagtttgctgagtagctgggactacagacatgcactatcacacggggctaattttgtaaattttttgtagagatgcggttttgccatcttgcccaagctggtcttcaactcctgggctcaagtgatcctcccacctcagcctcccaaaatactgggattacaggcatgagtcaccgtgcccagactacatttactttcttgattgcactttgaggtttaggggctaatgcctgatgctttttttttatctgtatgaagcagcggccacacagatcttcatcaaaagctgactgttctcatttctccccaagtaatcactcttttttttttttagcttgtgctaaatcattttttaaaattgtagctctgaggcattttattatacaaagttagtactcatatacataaactaataggaacttaaaactcattatacctttgcttcattttttttagcttgactccctcgtaaatctttagcttcattgatttggctgctatgtaagcttcattgatttggctgcttaaatcactccgttgagtgatttaagagcataatttagaagaatggtgtgtccatgtgtggctcagtttacagtaccatttggagtttgattgcttctgtgagttgggtgatctctcctcttgaggtccagatcaaccccaggaggagcctagctgctgctccccattgggcgccccatttcagcagaagtagccaggagtcgtcacccagaaccccctaacagcagttagtgtggcatctccacagtggggaatgttgtaggagttattaagaaattattttggccgggtgcggtggctcacgcctgtaatcccagcactttgggaggccgagacgggtggatcatgaggtcaggagattgagaccatcctggctaacacggtgaaacccgtctctactaaaaatacaaaaaatacaaaaaaaaaaaaaaaattagcagggcatagtggcgggcgcctatactcccagttgctcgggaggctgaggcaggagaatggcgtgaacctgggagacagagcttgcagtaagccgagatcgcaccactgcactccagcctgggcaacagagcgagactctgtctcaaaaaaaaaaagaaaagaaattattttaggcagataaagaggaaaaggggtccttgggaagttttcgttttttttttttttttttttttatactttaagttttagggtacatgtgcacgttgtgcaggttagttacatatgtatacatgtgccatgctggtgcgctgcacccattaactcgtcatctagcattaggtatatctcccaatgctatccctcccccctccccctaccccacaacagtccccagagtgtgatattccccttcctgtgtccatgtgatctcattgttcagttcccacctatgagtgagaatatgcggtgtttggttttttgttcttgcgatagtttactgagaatgatgatttccaatttcatccatgtccctacaaaggacatgaactcatcattttttatggctgcatagtattccatggtgtatatgtgccacattttcttaatccagtctatcattgttggacatttgggttggttccaagtctttgctattgtgaataatgccgcaataaacatacgtgtgcatgtgtctttatagcagcatgatttatagtcctttgggtatatacccagtaatgggatggctgggtcaaatggtatttccagttctagatccctgaggaatcgccacactgacttccacaatggttgaactagtttacagtcccaccaacagtgtaaaagtgttcctatttctccacatcttctccagcatctgttgtttcctgactttttaatgattgccattctaactggtgtgagatggtatctcattgtggttttgatttgcatttctctgatggccagtgatgatgagcattttttcatgtgttttttggctgcataaatgtcttcttttgagaagtgtctgttcatgtccttcgcccactttttgatggggttgtttgtttttttcttgtaaatttgtttgagttcattgtagattctggatattagccctttgtcagatgagtaggttgcgaaaattttctcccattttgtaggttgcctgttcactctggtggtagtttcttttgctgtgcagaagctctttagtttaattagatcccatttgtcaattttgtcttttgttgccattgcttttggtgttttagacatgaagtccttgcccatgcctatgtcctgaatggtaatgcctaggttttcttccagggtttttatggttttaggtctaacgtttaagtctttaatccatcttgaattgattttttataaggtgtaaggaagggatccagtttcagctttctacatatggctagccagttttcccagcaccatttattaaatagggaatcctttccccattgcttgtttttctcaggtttgtcaaagatcagatagttgtagatatgcggtgttatttctgagggctctgttctgttccattgatctatatctctgttttggtaccagtaccatgctgttttggttactgtagccttgtagtattaggaatccaacttacaagggatgtgaaggacctcttcaaggagaactacaaaccactgctcaatgaaataaaagaggatacaaacaaatggaagaacattccatgctcatgggtaggaagaatcaatatcgtgaaaatggccatactgcccaaggtaatttacagattcaatgccatccccatgaagctaccaatgactttcttcacagaattggaaaaaactactttaaagttcatatggaaccaaaaaagagcccgcattgccaagtcaatcctaagccaaaagaacaaagctggaggcatcacactacctgacttcaaagttttcgttttttaaagcatctccggaaaagtttctcgtaaagcccagtctcttagagccaggtggcaacctttgatatgcaaatggaagccgttagaaactgggtccacccaaacatggcgattcccacactttcttggcctttccccacctgttcctagcaacatggccgcccccacgtatccccaagtgtgtagaacatcatgtgtcctgcatttgcatattagaaggctagggtgggagggccagctttttccagggctacatcaatgacatgcccaatcaaaccaatcccctaagccctatgcaaatcagacatcgcctcctccagcctctgtatacctagctggtatctggggcaggtgggtttccctgtctccgctttggagcccccgctccctctgtctctatacaggggagcttcttccttctcccttcttgccccttcttgcctattaaactctccgctcctttaaaaaaaaagaaaaagagcataatttgtctgtgagcagcaattattttcccttattggcagtcgggcatacatggagtattaatgctgcttcccattttgtcattttgggttcaaacccacctctgtagtagccaccaccgaaggcagattttggtagactttgaaaaacttgttctgcttgaggctccatgtgcttcatggcttgcaacacctaatggcctgcaaattctacagctacaatggtgagtccagctgctaccacctactagccatggctccagcctggctccccctgccaccacctggagcatggaccatcccagcccagaggtcactgtcaaaaacaacacgcctttaccggagagcaacacagccactgacagcaagctcaatccgcacaagtccaccgacagcaagcccaatctgcccaagcccacccaccgcgagcccaatctgcctaagcccacccaccgcgagcccaatccgcgcaagcccaaccacctcaagcccaatccgcccaagccccgactcatcagttcttcacaccccatatgctttctttttagagtgttgccccctaaaccattcatgatgagtacctttcaccatctgtttttttctttttaccctcttggaaaagaggaaggtcacctgaaggtcaccactggaaaaccttgctggctctggggagttattggtctgtgacactgttcagacttgggctgtaggcagtctggtacctgtgcagcctctcttttatttgtttacttttattgtaaaacctgtgtgcaaaaaagtatatgtagtgtaaagataaggtttaaagaatagtggtgaaaaagaacatccatttaccctccaccaagcttgagaatttttttttttttttgaggcggactctcactctgtcgcccaggctagagtgcactggcacaatcttggttcactgcaacttccgactgctgggttcaagcgattctcctgcctcagcctccggagtagctgggactacaggtgcccaccaccatgcctgggcaatttttgtattattagtagagactgggtttcaccatattggccaggcttgtctcgaactcctgaccttgtgatctgcctgccttggcctcccacagtgctgggattacaggcgtgagccgctgcgcaccgcagcttgagaatatgagcagcacttttgaagtccctacgcaatgcggcttccctcatccctcctttccctctctagcccatcagaggcaaccactgtgctgaatttagtatcaatcaaccccttgatattaatgtagttttttaaccacatattaaatatttaaataatgtattgcttagtcgtgcttccttttgaactttttatcaatggtatatagtatgtatttttctcaacatactgattttctaaatgttacttttaaaaaggtgtatctgtgttgatttagctacagtaattttaaaattaggattcatattccttataattttatctctggggaatttttgaggatcttcttccagaaaggactggggttttatttctccagatacctggagtattattaccagcccaaggcctcctacaaatacattttgggtttttttgaaaacgcaggtggtgtaaattctgactccagccctaaactcaggcaggcatttcttcatttcatttattgcacccagaacaaagtctgagaggggcctgtatcctcagttcatttctgtggggcaggtttttgtttgagtaaacccactgagtgtgttgacctttggggaatcctagtttttgtagagttctctcatttagattcctatacttctaaaaatgtaaagcaaataccaataaaatagcataccagatattggttatcttttgccctaatgtggtgtaacaagtcaccacaaaacttagtgatttaaaataataatttggccgggcgcagtggctcatgcctgtaatcccagcactttgggaggctgaggcgggcggatcacctgaggttgggagttcaagaccagcctgaccaatatggagaaaaccccgtctctaataaaaatacaaaattagccgggcgtggtggcgcatgcctgtaatcccagctgctcaggaggctgaggcacaagaatcacttgaacctgggaggtggaggttgcggtgagcagagatcgtgccactgcactccagcctgggcaacaagagcgcaactctgtctcaaaaaacaaacaaacaagcgaacaaaaacaataatttatttttgctcttgtgtctgggagtcagttagggtctgctggtccaggctgtgctcagctcagcttggtgccccgctgtgggctgggttcagcctgctccacacgtctctcatcctcctcagatccatagagcatgttctcctcatggcagtggcagaatttattccaagagtgcctagcagaaacatgcatgagcagaaacatgcaatgcctcctaaggtctagacctgatgcacttcctttctgcccatgctccgttagctagagccactcatgtggtcctcagtccaataggaaacatattctgcctctagtggaaggagcggcaaagtcacatggcagaaggtctagatacaggtagagaatcttgatcattaattcaatttgccacagggaaattgctttcctttacctctgcttgctagtgctgtggatctgtgctcactgaattccattctcaaacgtttacatttcctgagggtttgatttattactcaagtatgttcatctctactcctgaagtctctcaggtgggatattccagatgagatatttcctaaaattgaaaaaaaaaaaaaaaaaggccaagtgtggtagtggctcatgcctgtaatcccagtactctgggaggccgaggagggaggatcacttgagcccaggagtttgagaccagcctggtgccccactgtgggttgggttcagtctgctccacgtgcaagcaacaaagcaagactccatcactaccaaaaaatttttaaaaatgaaaaataaaaattagccaggtgtggtggtgcgtagttgtaatcccagctacttgggaggctgaggtgggaggattccttgagtccaggatttcaaggctgcagtgagctatatggcaccactgcactccagcctggatgacagagcaagaccctctctctaaaaaaaaaaaaaaaaaggaaaagaaaaaagaaaagaaaaagaacatcaggagaatgccaactcaagaggttcactgcttcccccagctttgctactttggcagggtagggctcctgagaacaggagttcctgtgggagaatcgtttcttacaacttactcatcatacgtcaggatgtcacctggtctctgggggtacctgtggataacctgtggccgggatgggtaggacaaggtaaaacaaaactcaaactcaggtgggtgtggtggctcatgcctgtaatctcagcactttgggaggccagatccacttttgggtggatcacctgagttcaggggtttgagaccagcctggccaacatgtcaaaaccccatctccactaaaaatacaaaaattagccaggtgtgattgtgcacacctgtaatcccagctacccagttgggcgaggcacgagaattgcttgaacctgggaggcggaggttgtagtgagccaagatggcaccactgcactctagcctgggcgacagagtgagaccctgtctaaaaataaaaacaataaaacgtgtcaaactcacacattttaaatattgattcttaagccactgaagaactatatcctcattgtgctgaaaaacaatgggatacaaacttgttctattttcaagacatctagatcttttgttatatttacaagaaagataaattaggtggtggctattcataaattaatgaaagattcctcactttataaaaggagttggtgcaaggtaaatttaagtagcaaacttttccaaaacattaaaaatttcatgcaatttgaaaattttggctgggtgcggtggctcacgcctgtaatcccaacactttgggaggccgagataagcagatcacttgaggtcaggagtctgagaccagcttggccaacatggtgaaaccccatctctactaaaaatacaaaaaattagccagctatggtggcatgtgcctgtaatcccagctgctcgagaagcagagacaggagaatcgcttgaacccaggaggtggaggttgcagtgagccgagatcttgccactgcactccagcctgggcaacacagcaagactctgtctcaaaaaaaacaaaattttttaaaaaattttcttacaacttttcagaaacctgtttatcacatataacaggaaatatttgcaggtctggggctatttttccattgtggtgatcagtatatatttttaatgatttcatttcatttttattaaacttttttttaaggattcatatatggttcatttcgtgtactggttaatgtttgttactttaagccattaaaaagcagaatttgagtcttacaattggacactgtttgcatattgttttagttatttctagttttttgtaaagtatataaatgcgtttttttcttccaaattattggtcggattgtgtaattattaagagcctttgatctgagggtccctgtgtgtctcatctctctctctctttttttttttttttttttcctgtggcggagtttcgctcttgttgcccagactggagtgcaatggcacgatctcggctcaccgcaaccgccacctcctgggttcaagtgatgctcccgcctcagccttccaattagctgggattacaggcatgcgtcaccacgcccggctaattttgtatttttattagagacgggatttctccatattgatcaggctggtctcaaactcccgatctcaggtgatccgcctgccctgacctcccaaagtgctgggattacaggcgtgaggcaccgcgcccggcctgatctctttactgacacgtgcccacaggggagcaaggaattcctaacttcagtagtaacttgggaatttcattgaaaagtgacaactcctttccatctttcatacttatttttcccaccatcttctgggttttgataattatcttttaggtactccaagagtactatgataggcttaaaaaaaaaaagaacagaaaaggagacagctgggaaatccaccagcagaatcaagttccatataccaaattattttttttcatattttcttacatattgtttgtaccatctcttcatcccactctactttcggagcgagcattattcctggaagaacttttgtattttctcggagtccatctgctctgaatacttatctcccacctgaggccatcatgttccattcggagcatcgtaatcattttcacagcaactaaacatgatttcacacacagcagattatgacttctgtggggagtgagcagtgtaaaatgattaaccccttaggacagggaccccatttcacactaatctccttagcaaccaacagaagacaggaaaatggacagcataaatggattgaggataatgcagcatcccatttaacgatcagttctaaatgcctccggaacatacttccaaccagaaatgatagctgatgccaaagagtattgagcaaatgtccctggaaaaggtggcactcgtgtggaagaaggacatgggaacatatgccgtaaagattgggggtccatcagggatgaagtcttgcctgactgtggtgggccgctgggccagtaggactcccggagagacagcatcacagaatgcatggatggtggggttccgaatggcttaagtctaaatgagttgattctacttttgtctagttccgttacgttttggggaagaagagctataccatgcataggtttgtgaattagttcttataacctccctataattacagaaacaaggataacccaaaggtcttgatttttttttcctaaaatatttctttttccctaaaagacttcatggcaattgaataccctgttttcagtttactattgctagttcaaggaagggagtttttactgggaagaagaaagtcaatctaaacaatgccacaactgtttgtttttttttaaataaccttccatgcctatgacacaggcagctaacataatgggttccattgtatttgaatgcttctgaagttaatgctacctttttctgcatgacttacatatagaggaagtcgggttggtttgtagccaatggctgttagatttgatgactaacagtaggtatctcagtaacaaaatgtttctctctccatcaccattaattttggaatcttcaccagagctgattgatcaactcagacaacactctttataaagtataatgaaattagaattttgatttagtcgtaaatgtggttacagggtgggatttgaaagcatcttctgtcattgaagagaagactatcatcaaagaaattaccggcatgctataggaatccaggcattgtggaaccttctgttaccccaggcaattattattattgtgattttcgactcggcaagtgtatggacttgaaaaaatcatctaataaacatttattattagctaccctttgcctgatagcagaaaatgagaaggaaccagatgcacccactttaattaattggtgtaatcaggagtggtatgcgacatcaagggtgaaaattgctgacttaaactgtggctttgtggctccaatgaagtcttgaagtcttttttccccttgaataacaacagaatcagagcctctggattttcctttctcatccatctgaatttctttccttttttgggggtggaggtgtgttcaattgaaacttttgatgtggtgataggattcccaatttttctgcaggagagttgggagtttattcctgagttttctcagttcattcaaaagaccaacaaagagaggaacaacatcaggaaatgtaatggaaacaatacatgttatcctccttttgcctgaacatggtacagattgaagtagcaaccctctgcttagaaaaaccttttctgttgttcccgactaagcaaaccatcctttaggtctctgcttagacatcactttctctgagaagtcttcccaaaataccctccctcccaaaccaccctaccctccatccttcctccagctctgttaggcttccttattcccgtcttagcacttcatccactttattttagaattgcctatttattgtctatatcctcttttacttggggtcaggcactgtgtcttgtcacctctatatctccaggatctaatacagagcctagcattcagtaggtgcttaatcaaacctttattgaatgaatgaatgaatgaatgaatgaatgaatggaagtagtgtctgtctcacctaggtataccttactcatgtctgcattttcagtacctactgtcactggaaaggagttccgatccagactccatgagagggttcttggatcttatgcaagaaagaattctagatgagtccataaagtgtaagcaagtttattagagaagtaaagaaacaaaagtatggctactgcacagacagatcagaaccgagggttgctggttgcccacttttatggttattttttcatgatatgctaaacaaggggtggattattcatgcctcccctttttagaccatgtagggtaacttcctgatgttgccatggcatttgtaaactgtcatggtgctggtgggagtgtagcagtgaggacgaccagaggtcactctcgtggccatcttggttttggtaggatttggccggcttctttactgcaacctgttttatcggcagggtgtttatgacctgtatcttgtgccaacctcctgtctcatcctgtgattaagaatgcagcccagcaggtcacagcctcattttacccagctcctattcaagatggagttgctctggttcaaatgcctctaaccctacttggtgtatcagttatctattgctgcataacaaaccactgcaaaacttagtgtcttaaaacagcagctatttagccatgattctgcagactagcagtttaggctggcccagctggtcagtgctggtttcagctgggctccctcatgtgtctgtggtcagcttccaggccgttgagtgctgggtgttctaagtaggcctcagctgggggtgttgtctcttttccctgtgatcttttatcttccagaaggctagcctgggctttttcaagtggcaactgggcagggctgtaagaaagggagcagaagtatgcatgacctcttgaggcccaggctcaactggcacatcatcacttctgctgtattttcttggctgcagaagtcacagagccagtcctgacttaaagggaaggaaaactgacttctttgagaggaggaactgcaaagataggttttaaagaggcagggatacgtggaggagagtaattgaggacatttttgcaaacaatctattattcttggcatagtgtaggtactctaaagcacttgactactttgagtccaacaagtattagatttagcccaagtcttggaaagtcttccaaagaagataaaatttctctttggttgcattctgaatccctgcccttccccatctcctattccctgatccctccactgctttgtgacccaagcatgcaggccttgtgtggctgtcagcgcccaggtcctcctattcaatgggtgatacatcctggacacctactgttctcctgagcatcttgtataaactagaccccacacccgacgggaccacagcagtgagcaagaaagacagattcctgttctccactgggaaagatggatgtttgactagaaactacgaaatggatgtttgactagaaacaggtaacagaggggacctgccttgttgaggacctggcatttaagctgcgacctaagaggtgggtaggaaggggtgttctcgccatggaggaggtggcggtgacagtgtggggcccagagacggtacggtggagcacttttcagagagagggagtgtgcagaagggccctggtgcaggaaactgggagaggacagaatggcttcagctcaggggtgagggatggcagaggtgtgccagaccgggtctcctggggctgggtgagccaaggcactttcccaagagatgactggaaagctgttgaagggttacagacacaggggaggtgacccaatttactttttaaaatcatcctgggctgcatagataatacatgtagaggcgtgcaaggctggacatgaaattccttccattctccaccatcaaaacactctacccagcggggtgtgaggaagaaagcaatccgatgacatcgaattcgcactaaagttactgagaaccttgtcatggtatttgttcaaatcttgagtgtgcagtcttcgaaaccctctgagctctgttccagactgtcctctcagccttgagtgcacatggggcaccggaagctggtgcactggggaagagagggaaccgtcactgccagctgcccggtggtgcaacccccattcattctgatgtgggctggctggctggcaaggcggcagaggggctcagtgtcgccgtgtaagtcctcaaacggtccttgctagtggctcactttagaggggatggtgcacggctccttttcctcgggatctcagagcaggtgcttcacctgcctctacttcccccttgcccatattccccccattgggtactattttaccttttcattggatgtcatttaaaaaatgtggtaactcagcaacacctttcactgccttaggcatctggttttctgtgtgacacagaggccttccttctggcgctgtctcccgggagcatcttcaggcagcatttctctaacttcactgaatgattctggaagtggctggcagatcactgtcagtggagtcaaccagatgtgtatctgctaggccatttccctttccaccttccctcggttctcgctgggtcacagaagcaatgtcataacaacacagcttcctcctaatgaaacatctgcagccaccctctggctgacagttcattaaccttgtggcccaaactgcttcggtgccgtccctgctcctgaattttaacattcagagttttcttcaaagcccaggtctgcttatcaatcatgttcaatattaggttacttacagaatgaagtcattatctttaatgtttaataactgtgccacaaagataatataataaaatctgagaaatgtaattgagagaggcttttgactcaagtcttgtgtgtgtgtatgtgtgtgtgtgtttaatctttcctaatcctatccccaaggctaagaaaaaccttgttttcgctctgtcttctacttggtttgtctcttttgttttgtttttgcttggcaatgtcctgatcagtctgttttggtgatggctgagtctggggagctggcagcagagatgatgacactgggattgacactatgctgcaggagggggtggttgacggccacaggagatgttgtggggttggacccttgcagggcatggatttggtcaggtatggggaacaaatgaccagcgtggactctgctcctgacacaaatgaacaaagtgcccagatctgattcccccagccctggtggcttccaggtctttgaaggtagaattgagcctcacagcagatggctcctggtagtgaagagattcttgggcaaaagcctggtcattaaagaaggaagatttctttctttccttttttttttttttttggagatggagtttcactcttgttgcctaggctggagtgcaatggcgcaatctccactcaccgcaacttccacctcccgggttcaagcaattctcctgccttagcctcctgagtagctgggattacaggcttgtgccaccatgcccggctaattttgtatttttagtagacatggggtttctccattttggtcaagctggtcttgaacttccaacctcaggtgatctgcccgcctcggcctcccaaagtgctgggattacaggcgtgagctactgcacccagccgatttctttttatttttttgtttaggaaaatgtataaaatggaatgtagtcattttgctttgtcttcttggaagaagcatcaatatgaataagtctttgaatttgcaagttaaaactctgattttccatgggcagaatccgggtgagaaataagtctgtttgactgttttgagttcttcctttaaagaatatagaccatgatggtggcctgtgttgtgtcctgaggggctgtgtacacggagtctatggcaaggttcataaaacgcttagaggtttttcagagaaaggagctatagaaatggaaggtggcacagttgtgttggaaacctcccacggggtctccaggctctcatttccctccaagtcataaagtgagaggatctgtggtaagtctccccctctcccctcccctccctctcttattctgttctcaaggcaagaagcaaagcatgagggtctaactatacaggacaatccttccacggttcctctgcgcagtcccatcttacatctttggaggagttggatagcttttctttcaaaattttacaataattcctttcctttttctgaattgctttatgagttgacttgtcttcctaaggagtcaaagttaacaagactacccttgaacaatgtgaaactcaaccaggtatgtagcaggcttttggttttttatctaaatggttgaatttcttttttggtctagctgtattaggaatagagagaagagaatttctggaagtggagaccaggaaagggttcagactagttcttattattattacttttttttccctgagacagagtcccgctctgttacccaggcttctggagtgcaggggcatgatctcggctcactgcaacctccacctcccgggttcaagcaattctcctgtctcagcttcccgagtagctgggattacaggcacccaccaacagacctggctaatttttgtatttttagtagagatggggtttcacgatgttggccaggctggtctcgaactcctgatctcaagtgatccacctgcctcggcctcccaaagtgctgggattacaggcgtgagccactgtgcccggctgggttcttgagggagccaggctgagttctgcagatgcttctgtttttgactgctctcatattttctaaagtacatcctagtctctttcaactcatggggaaaattgcagagagttagggcccgtatagtatgtgacaccaatcaagacataaataatgaagcataaacatgtttttaaaaaacctgttatttgggatggagagaaaataacccttttcaaacattcgatataactttatacatcctagggaaatgtttacacacaccattggtttaaaattttagctgaattattttgatacttcagttcaacaaatggtcaattcagtcagttttttaattgatttttcacaaaatggaaccggttgactgcttgactcaactagtcatttgtgtgatacagacgcaggcttagaagaataaggttgaactgggcagtggcagatggctaaggtcgagtttaaggaagacacagagaactctacccatgggtccgtatcatgggttcctgtcctcacatccatatcatcagttcatttagtgaatgaaatcataatccctgcctctcaaggtctcatttgatttcacattcagtggcgttttcagtctgtgttgaaagcacatgagatgttgacgcatttgcacacatggtgagccaggaaggaggtgacgagagtgaactgggaagagatcatttgaacattagagatgacgattctgtttactattttcttaagtccttactggaaatattacttttcatggactagaactaattggaagtaagatatcctgtaagtccatttagaaaaaattcttccaactagttctgagcacgctggatttgcctgagaaactctttgggctgcattctgagggtggcttgggtggatttgccttgacttgatggccttgaggaataaggaggcctgaatgggcgtgaaactgtgtttagaacttgagttggcctgacacagctctggttcacacttgaacttatgtggacacttctctgcctctccattattcatctttgtacctcctgcatctagcgtaatgttgaacacatgacagacgttcattagatgttcagagtctggttgtttgccagcctaaaatgcttagagtttattgaattgggttgtacatgctactaggacctatgactttggggaaggaagttttagggttcagcaacctttcacgttttgtctttttttttttcttatgggctaggatatttacccaaggtaaattcagagaacaggggtgcgcagtgttacatatggcattccccacttaggagcaagtgactaatatctgtgttaactgaagtctgtcttctcacaggttctgtgctgaagaaccatctcactggctgacaccccttaataagacattctgaatctccatgattacaagattggagtgtgttcagaaccagaggcaagcagaatagttcagagatgtgggtcgtaatctgagtggggatataagggccccgacacaggtgccaccgggcagctgctggaagtgggtttggagccgcacagtgtgcaccaaggtcagtcctgggtgggggacgtgcagccaaaggaccatccctgcgggattcagactccagatcccctgctttcccatcgccatgggatgcccagaatgttaggaacaaaatccttgctcacgaagtcggcctcacttttccctgcccagctactggcttccacgtcctcgtctttatgaactttccatcatgtgtctagaattccatcccctctgctccctgctgattcatgcccgccattttcctagggagctcagtcaacattcagctcttcaaaaattctttttctggcctcatctcaggactgtacttcattttgtagtttttccacacagaacttgtaagcactcttgaatcatttcatttatgtcccgactttttagctagcacgcttaagagcaacacaggccttgtttttctgtgtatatgctgaagcaagcagaactgacctacccaaacttaatagtatgaactgtgttaatataaattgtcagctctggagattttatttgattctcaaagtaactctgtgaaggccaggcatggtggctcacgcctgtaatcccaacactttgggaggccaaggtgggtggatcaccagaggtcaggagttcaagaccagcctggccaacatggtgaaaccccatctctactaaaaatacaaaaattagccggtcgtggtggcacacacctgtaatcccagctacttgggaggctgaggcaggagaatcgctcaaactcaggaggtagaggttgcaatgagccgagatcacgtcactgcactccagcctgagtgacagagtgagattctgtctcaaaaaataaaaaagagcaatttttattatttccatgtttacagatgatgaaactgaaattcagagaggccaggtgacttaactaaggtcacacagccaagtggaaggcagaggtgggatttgagtctttgctgattccatgtctattattctttctactgccatacactgtctttctggtttgctgattcaataaattttgccttgaaaaattagagtcacaattgtcttttgaaagcctttctttggaggaaatatcctctgagaaactatgattttttagaaaataattggacttagagaaaaggagtaggctctgcctaaggaaaaaatgtattacttagtcctttatcaaacatttatgggtttactctgtactgtgctagttgatgggagtgggactagggtcaaatgaggacatggtttctgtcctccctgaacccatagcctcgtggcttggagatgggacaccatggtggcagatgttgtgtgtgcttgtgaatctgaaagactgatgcctgatgggcatcagtttttgtttgtttgtttgtttgtttgtttttgagacagagtcttgctctgttgcccaggctggagtgcagtggtgtgatgttggctcactgcaacctccacctcccaggttcaagtgattctcctgcctcagcctccaaagtagctgggattacaggctcccaccaccacacccagctgatttttgtatttttagtagagacgggctctcaccatgttggccaggctggtctcaaactcctgacctcaggtgatctgcctgcctcagcctcccaaagtgctgggatgacaggcatgagccaccgcgcccagccctaatgttctaactcataaggaaattttaccttcattcactacgagtaggctcatactatacaaatattagtttctagagtccattgatggatgaagagataaacaaaatgtggtctatgcatacaatggcatattcttcagcgtggagaaagaatgaaagatacgtgctatagcggtaacatgaaccttgaagacattatgccaagtgaaataagctaaacacaaaagcacaaacattgtatggttttgctcatgtgacaggcaaaatcatagagaaagaaagtagaatagaggttgccagcagctagagggagggagaatgggtgccgagtttcagtttgggaaagtgaaaaagttctgggcatggcgattggtgatggttgcaaaacaatgtatgaaccactgcattaatgtacttcatgctcttgaatagtacacctaaaaatggttaaattgataactctcatgttacatataccacacagaaaattagttttcagaatagctgacaagctatgcttagatatgtctttaaggcaggaggaagatggcagtggtcatagcagtgtgtggaaagcaggagagaccccacatgtcaccaattagctctccaaatccagaaaacatcagggatgaacagcctccgctgcccatgatccgcgagctgtttcgctagcattccgaacaattctggcaaaggcggaaacactggaccaggatctgggtgactctttcacagttgattgggtaaggagaagcgctgttctcagagaaatgagaacatgtgtcttggaaggctgcctttgcttaatgttctacacgatccaggaggccagatggcattttatgtggttttcacaactgtgattttggattgattactaaacctgtttgtgttcctaacccagctcgctgcctcccgcctgccttttagcttaacgctcattcccagagctcagtttgaacaggcgcattgtttttattctgttccttattattattgcgttggtgccagcctttactaccttcagccctatttgctgcccagagtctagtgcagaaaatgaaatcctttttccaataagtgtgatcaaatgaaaggctgtcacactgcatttacatccaattctgggtttttttttttttttttttttttgagtttgggtcgcccacatgatgggttgtaaaaggataaaggataatttctgatgtcgtgccagcttttcctcacccagctgaccttctactatcagatggtattttcataggaaaggcaaattaattttatatctaatgtaagaaaaacattattaggaagattgtaatgaaaattaagtagtttgcaaaatgttttagaattttcatattacttttgcataaaaaacttctttcagttcttacaacagtcctgagacagagttcagcaggtgtccccatctcatgaggaaacggaggctcagagaagttagggggcatgtccaaggttgcccagctaacattggtcagagctggatctggagagcttatctgcggggtccacatccagaatgctttctaccgttctgctgtaccagctggaaaacaaaatcccattcgagtaaataatatcagcaatagccaccattttaagcaacttaccaggccatttactaaataagtctccttgtactgtagtaactctcatgactaaggtctgcagacgacccatttaataggctggcaaagtgagtcagagattgcgaggagaggctgagagcttcctgggaacatctctgttgatgtcttgaactgggttcccattgttccagcagggaaactgaggatagcagacattgcaaaatgtccttctgtgaagagacttctagtcgttttggtgaaaacacagtgtcctgctgcctagctgaaatcctggtatggataagtttatcttatcatctttctatttctagtacttggcccagatcgtgacctaacagcaactatttgttgagtggaacctccaaagatagcagtttcttcttgtggggaattacagtctattgatttgctcaatgcaagttcattttattaagatttcttcacctgtgtgtttatataaatagacagccaggcagtgcatgaaagtggctgcccggccagagtctggctgggctgcttcgttctactctggggattggacccagtagaattcttggacttggtgtggagtcccaggtcaagccaactcattacttctacctctcctttttaaaaagggttttctgtctttggttcaagttcctcttaaaacacaatcatcatcccttcattgatagaggcacaaatgaattattttttttcttttttcttttttttttttgaggcagagtcttgctctgttgcccaggctatagtacggtggcacgatcttggctcactgcaacctctgcctcccgggttcaagtgattctcctgcctcagcctcctgagtagctgggattacaggtgtacaccaccacacctggctaatttttgtgtttttagtagagacggggtttcgccatattgaccaggctggtctcgagctcctgacctctggtgatccacccgcctcggcttcccaaagtgctgggattacaggtgtgagccaccaagcccggccgaatttttaatttttttattgaaatggagtctcactctgtcacccaggctggagtgcggtgatgctatctcagctcactgcaacctctgcctcctgggttcaagcgattctcctgcctcagccccccagtagctgggattacaggtgcgcaccaccacacctggctaatttttatatttttagtagagatgggggtttcgccatgttgaccaggctggtctcgaactcctgatctcaggtgatccacccgcctcggcctcctgaagtgctgggattagaggcgtgagccaccacgctcggccgaggcacaaatgaatttaaacctcattgaaatgacagcggatggccatggctctactgtggtttccctgggccactttcttctcccgccttcctgccgcatgcaggagtggaggccgaggctccctggccaggctgctctgggttattacagtgatatatcttggaactgagcttgagcagggatcctcctgtttcctgttggaattgattttctgtccaactttcatttcctattgtgcattcctttggggtcagagcagctttctcagacaaaagcagggctttctgttttggagatattcctggcgtctcttcagctgcgtgtttatagaaatggacagcccggcagtgcatgaaagtggctgcctggccaaagtctggccgggctgcttagtggtactctgggggttggacccagtaggattcttggacttggcgcggagtcccagatcaccctgtcattggccctgtatcttaacttgtaggcacgtcttcatctgtcagatgggctttgttctctgaagcccgcatcagagagctcttcagaagagaggaaatgttatattgctgttatcatttcaaatgcttaccgctaagtgaatctggttcaaagcttaacagcctgtgggtgaaccgcaaaagctcaattggatctcaaagaaatccctggtcaagccctgtgccttctagtacccaattatttatcaataagtgtgaagattgcaacctccagattattcagccattgttgagatgtgtaaaaacggtatccccagcaccttgaaaggctaagtaggatcaaccccccagttgttgttcactttctgtgtcctcagaatccacttttgtttcagtccttctaacccattctcattgttttctgtcagtgttggaataagtggaatagcagggtccataaactctaccacttgattgtcaggaatgaagaatttggttttctctgttgtcataacattcgtgagtacatctgtaagcaggcattttcccatcatctttcccgcatttctaatgaatgtgacatcagtctatttgctgcttcataatcaaggtcctgtttgttgatatgtaatcaaagcaaccggattatgtttgtcagtacgagtcagaaaaatctaatatatatttactctgatgccataaggagtgtcagcctttgctggcctcaataatctcgtcttgggagagaaagctcataatgtggtgaagataccgttttgggattatttctagaacgtgatagttgtgccgtgcacatacatgtccaaatgcattgagtcatgtgatagcatccagttttatgcaaccaaaattggacattatattgtttggatagagtgctcaagatgggtggttcctggatagagtgttgaaggcagtggtgccatcaattcagcagcaaggaacttaatagctttctcatcacagtcctcacctcctccctcctttttctgtgtcacagaagcagtaagaaacatcgaggaatttcccaacatatcagggaatttgttatttcttctaaaacataaggaagtacgtggcaatataaatggcaaatgtgcggggtgcggtggctcacacctgtaatcccagcactttgggaggccaaggtgggcggaccaagaggtcagcagtttgagaccagcctgcccaacatggtgaaaccctgtctctactaaaaatacgaaaattagctgggcgtggtggcgggtgcctgtaatctcagctactcaggaagctgaggcaggagaatcgcttgaaccttgggggcggaggttgcagtgagccaagatcgtgccattgtactccagcctgggcaatagagcaagactctgtctcaaaaaaaaaaaaaaaaaaaaaaaaagaaagaaatggcaaatggacatttacatggtgattagaaaattagaatacaccgggaaatctgggttctgttctcagtcctacttgtaacacatccactgaccttaaacacatttctttactttgctgcacctgaattcccttatctgctgtaaaatgaatttgttgaactaaactaaatgttctttttttttttttttttttgcgacggagtctcgctttgtcgcccaggccggagtgcagtggcgcgatctcggctcactgcaagctccgcctcccgggttcacgccattctcctgcctcagcctcccgagtagctgggactacaggtgcccgccaccacgcccggctaattttttgtatttttagtagagacggggtttcaccgtgttagccaggatggtctcgatctcctgacctcgtgatccgcccgcctcggcctcccaaagtgctgggattacaggcgtaagccaccgcgcccggccctaaatgttcttaaagatcctttccagccctgacattgaactcagtacatcaacttacatgatttattcgcacaatcttagcagaattaatttggatttgttaattgtttgcatctggctaattattgcctgcacaccgtaagactatctaacagtagtagtttcttatattaactaaaggtgctgtgaaggaaacatggaattcccccaaaatcaaaactaaaagaaacttctgctttagagcaaacactgataaaatatacataaggcaccctagctgcactgggcccttctgccctcttcagcaagtcctgcctgaggtgcacacaattattactggctcttgtgccacaaagtgacatcgtctttggctgtgacaccacatgaagagggaaggaggtgtgagactgtgaagacactcagtacaggtgcagcctcctccacagagtaaatgtgatacttctcgagttaatgactatgttgggaagttttccaactccaccatcttccctgcttcaacgaggatcccagggggaagctcacagatttgcagatctttttacactaaggaagaataaagcagcattccagttgcaggagtataagccagccacagacccagggggcacatcttacactgtctttgggagaaagaaaaagtactaataacaaataaatctgatgggatttcagatggattccagtctcattcttttgtgatagcagggagtgaggttttgatatattccctctagagatggttctaaacatggagacccatcgatatccaggtatacctcctctcctctctgatcaatccaattgctaaacaagaccagagcaaggctcagtagttgatggcaagtgcttctgctaattgccttgcgattggggaatcaggaggatgtttttattcaggaaggcatgtctgaccaatgaaacaaaatgcagttggtatcattttagatttggctcttgaatcgtcagaaatatgtgccttcactaactttgaggaggaagtatcccttctctttgggtatctctgggaagttgctttattgatttttcaccagtttgcagacaagcccaagtctaaaaaaaattcagatgtagcctaatactgcaagcctttcttttatctgtctatctatccatctgcctgtctgcctgtctgcctgtccatccatccatacgtccatccctccatccatccatccatccatccatccgtctacctacatgcctgcctacctcagcctcccggatgtttgaggctgcagtgagctatgatcacaccactgcagtccaaactgagtgattcatgattgcaccactggactccagaccaagtgacagaacgagacagacccatctttaaaaaaaaaaatgattatgagaggtctcagtgcagaaatggcttcctcctgcccattgtgccagcttgcccaggcccagaggttgagtcatgatatgaatgtgctgtgtagtgtccagcaccagaagtgtgggtatagtggaggaaaaagatacagagccagaaccaggacatggaaacatttttaagctatatgtttttaaaaatcaccacccccatgctagagagaggactgaattaggtttctgttttctctctaaaattgatataacaaaattgttgtcatgtgaagagaaaatcaaagagtatgctgacaaaatatgtgggaaaatctaaagcacagggacaaacgaaaaaaatagatgacttgggactatatcaaaatggaaagctttttttgttgcaaatggtaccatccagaaaatgacaaaagcaacccacagaatgggagaaaatttttgcaaatcacatatttgataaagaacctgtacccagaatatatgaaagactcttgccactcaataataaaaagacaagtcaattataaaaatgagtaaaagatttgaatagacatttctccaaagaagatatacagatggccaataaacacatgaaaagataattcagcagcattagctatcagggaaacacaagtcaaaactacaatgagatacccctcatttatactcgcatggctagaataaaaaagataaacaatatgaagtgttgatgaggatgtggagaaattgaatccttatacattgctgttgaaaatgtgaaatgaggccggtcgcagtggctcacgcctgtaatcccagcactttgggaggccgaggcaggtggatcacgaggtcaggagatcgagaccatcctggctaacatggtgaaaccccgtctctactaaaaatacaaaaaattagccgggtgtggtggcgggcgcctgtagtcccagctactcgggagactgaggcagaagaatggcttgaacccggtaggcagagctttagtgagccgagatcgcaccactgcactccagcctgggtgacagagcgagacgactcctcaaaaaaaaaaaaaaaaaaaaagaaaagaaaatgtgaaacgatatagcccctgtggaagagaacttggcactttctcagagagttaaacacaatgttatcatatgacccaacaattctacccttgttatgaaaaaacatgtatccacaaaaccttgtacatgaatgtttatagcaacattattcataatagcccccaaatagaaacaacccaaatgtctatcaactgaagaatggataaacaaaatgtggcatgatctatataatggaatattacttggcagtgaaaaggaatgaagtgtggttcattcattgaaatattatggtaagtgaaagaacctagacacaaaagatgacatattgtatgattcctttgatataaagtgtctagaagaggcaaatctgtagatacagtatgtagattcctcattctcaggggctgaattgggacgttgcagctaatgcatatggaatttattttaggagataatgaaaatgttctaaattcgatgatggttgcacaaccctgtaaatatactaaaaagcatagaattgtacaatataaatggatgaattatatttcaatagagctgttttaaaaatattgaaaaccagagatacctgtctgtgctctaaaatgtatccactgccttctagatacagtctaaactctgcagcttggcttttaaagccttttatttatatggaatcctccccaccccccaccatctatacatttgtaaaccttacatgttattcaaatgccataattcgtcaaactggatatgttttctccttccagaaagatattccttcatccctcttataagccttagcactgtctgccttgcgttatatttatttctgtatctgtcatatgatctctatctgatcgagagctctttaaggccgggatgtcggcttgctcatattggcatccttcaggacacctgacccctaaacttatctgattggtacgtgatacatttttatcactggatagaatgaatgggttgtgaaattattagatgtgatcccagataggatactgtttttactaatctctttcacaagggtctttcaagaacaatgcaggatcaaacttataaagagatttttgaaactctcaaaactctgtgcagggtattattattatctgtaatcctggtaactattcaaattagtgtcaattaacttttggctgcactcttaagattctttatcatctacattagtttgtcagatgaggtaatgcactttttctgggtacagttgtctttgaagagattggcagcgtttcatagttgtaaacaaaaccgtctcatatgccggaccgtgacaaagagggactaggacgccagaagctctgtgaaaacacttaaatccatttcagcgaggaggaattgtgatctggtaaataaattagtgttctgctctgttccttggctcctctgctaatgaatgggccccagagatttttttttgtcttgggtgataagcccctaatatctattcaagttcagcataaagctcattttctctagaaatctttgtttaaaaacagaatttttccagtaaatatatttatcaaattaaaagtatttcagatacacagagagtgatataacaaacaaaccaccgcctgtgtctaacaaatgctggctttttgtcatatctgctttggatgtttttttagttgaaaaacatttcgaagatagttgaatcattcctttccttcccaaatctcattgcccctccctccctttcctctgaagccacaattatctctaccaggaatctctctctctcttttttttttttttttgagacggagtctcgctctgtcgcccaggctggagtgcggtggcgcgatctgggctcactgcaagctccgcctcccgggttcacgcaattctcctgcctcagcctcccaagtagctgggactacaggtgcccgccaccacgcccggctaattttttgtatttttagtggagacggggttttaccatgttggccaggtctaccaggaatctttaactggttaatctttcagtccaactttgatatcaattgttaactcttgagaccattttctatttcaaaactgtccatctgactcgtttctattactctgaaataatagaatctcagaattctgtgatctaccttcaagccgattaaatgggaatttttcccagagagagtttaaaccggcctctgggttaggggagaagtatagaccccaaagacccttacagagaaatacttgtcatcacgctcctggaattctgggagagggagaggcatgagaaggctgtgtggccttgtctttgaaatacagaagtttggtgacgcctggaacattttttacatgacaaatatggtgaaatttaacaggctatcaaagtgcagatcaggccaactgaatagcagttttggggaaaatgacaaggtgctaggtagtggagagaggaagattaaataacctacttgggtctatgtgctcgtgaagacacgctcatatgtcttccttgcatggatacctgccttgctctaaaataaacttgaagtgtgtttttaaaaaaagcatgtgtgcagcctgggtaacatagtgagaccttgcttctacaaaatacaaaataaaaagagtagccgggcatggtagcgtgcacctgtagtcccagctacatgggaggcggaggcgggaggatcacctgagctgaggaggttgagtttgaggctgcagtgagctgtgattgcaccacttcaccctggcctgggcaacagaataagaccctgtctcaaaacaagacaaaacaaaaacatgaatggaacaagaaagaatcatgaggtgaggaaatgaaggttaagggaagatgaggatcagagggagtaacaggttcagttctaagatgaggtccgcatgtggaatacataccattaggcacgaagctcgggctggaagtaccctacagactgcaccatgagcttctcaacagacagtgggtaaaggagtcagtgacagaatctagggcttttaagataaaagcaaaccagttggccaaggaagaatggctatttccagcacagatgcctgagggccattttttctgaggatgtggctctcacccttgatggacaatcaggacattctagcaaatgtgcattgtgctctagaggggtgtgtgcagggagcatagctgagggatggaggggctcatgtgcatcaggattgcctggaataccagggattattagtgccaataatgctgtcaatgacgttgtgatggttaattttctgtgtcaacttgactgggccgcgggatgcccagatatttggtcaaacgttgttcttgggtgtgtctgtgaacaaatagccctcactggtgcaggtgagtctcatccaatcggtcgaaggcctgagtagaactggccttcccgtgagtcagatggaagtcctcttgcctgactgctcgatctgggacatgctgctttgggactccagctgaaacatcagttcttcctgggtctcaaggctgccagcctttgggatggaatgacgccatcgggtctcctggttctcagccctttggactaccactgggactgtggtgatagtctctcttgggtcgccagctggccaactgcagatcttgggatctgtcattctccatcttatgataaatcaataaatacctctctcattatatatataatatataatatgaaataaattaataaatatctctcactatatatagtgatatatatatattaggtatattttatatatatgtatatcctattagtcctgtttctccagagaactctggcgaatacagacattccatatgcaaagagaggccgcgtggtcttaggtactagttgtaaaattataatatatattatattatatataatatttaatatatataataaatcaataaatatatatctcactatatatatctcttactatatatataaatcaataaatatctctctctcactatatgtatatatatcctattagtcctgtttctccagagaactctggccaatacaaacactccatatgcaaagagaggtcacgtgatcttaggtactagttgtaacattataatatatattatatataatatttattttatataataaatcaataaatatatatctcactatatataaatatctctcactatatatacatatcaatcaataaatatctctctctcactatatgtatatatatatatcctattagttctgtttctccagagaaccctggcaaatacaaacattccatatgccaagagagatagcgtggtcttaggtactagttgtacaattattttacatttgaagaggtaaacctttgggttcataggctttctaactgatgtcatggagtggtgggagggttttgttttcccttatccattaactttattcttaaaataacaatatcactaataacatttatggcatacttgtaagcacttcacatatattctctcacttagcatcatgacaatattctaaggggactgaggcactcagagcttaggaaactcgttcaaggtcacctagctaggaaacgatgtgctgttttcaaggccctcatctgaataaaactatcttccctttactctcagcggtgaaaatgggggagagatctgtattggaagctcattcagatgttgccttcttttgcactcgaaggctttgctctctgaaggcaggaagcagcaggcacgtgtgcagggaaggctgtgtatgtggcatgtgcaggcagcagcagcaacgcgggacgatggggagagagcccaggggagggaggatgcctgcagaagcggctgtgatgtgtgggaagccccgctgggccggcactgtggaaaggtgacctgcagagccacagctgcaaatgaaccactaattttcccatctctgcttgcaatttacaaagcactttcctggtgtcatgagtagctcccaagtatcagagcagggattgaaacttaagttgtttgacgctacactctgatttcctcaccccacctcactgtcttgccagttccaactgtacccctcaggaatttctatcaggagtctgtgtcaacatcagcatgaagctgaagaaggagaaaggaaatggggcaacaaagcacacagatgttcctaaaaagcaaaagcggaagagagaagctagactcgcctgtctctggtttttctcaccgcctgattgttcctttcagatgacccgcatctctcggagctgacctcagctcagcaagggtgcctgtgacccatggagcagtggccactatctctgcattgtgggagggtggtccgtgttgggtctgcagggtcgttgtcacagcgatgaatgtgtagatctgtgcttgctgaagctcaggctggtcgctgtcttgtcatcgtctcctgttacacagctttcaggctgcttttttggggaagttagactcgcctgctcttttttggggaagttccacctcactgcagccgggtatggtggtttgctcctgtagtcctagctacttgggaggctgaggcaggaggattgcttgagccaggagttcgaggctgcagtgagcagagatcacaccactgcactccagcttgggtgacagagtgagaccctgtctctaaaataaaataaaataaaaataataaataaataaataaatcaccccttggccaggcgcagtggctcatgcctgtaatcccagcactttgggaggccaaggtgggtggatcacctgaggtcaggagttcgagaccagcctgggcaacatggggaaaccctgtctctaccaaaagtacaaaaattagcctggtgtggcaggcgcctgtaatctcagctactcaggaggctgaggcaggagaacggcttgaacccaggagacagaggttgcagtgagccgagatcatgccattgcactgcagcctgggcgacagagcaagactccatctcagaaaaagaaacaaaaaaatcaccgtttaactcagaatcagccacgctgaattgaggtgaggttttatgcatatcagattgaagacctcctccggggagtggtaggctgatggcttagtcatcctataaagagcccagcatctgactgcacagctgggtctacctacagcatggagatggctatctgggaataatgggcactagaattggaggatcctgatgaaccacttcctggccccttgcttgtgccacctcccttcccgccaggtaaatattgcttagacacccagcttctgattaaagccacatgatggaacttgtcctaaggatgcaactgatggcccgtgtcagcttgttggagttaaaaaatatattttaatttgtttagctctctggggaaattatctgagcctgcatgtgataatcaactttcacatgagctttcaagagacctgaaatgatttgagcaacaaaatgagatttttaatctacataaatacaggagtcgtttgcctctctttttgtgtgtatgcgagaggaggggagcttaaaacaattctaattcattccttttcttctcccctaggacactcattagcaatggtaggaaaatggtcacaggagtggtaccttgcctcacattctcacacacattttccctttggactttaaacttcacatcaactcttaaggtgggggtgggcggtagcaagtgttgcttcccctttttatggaaaaaagtaggtctcagagaggttacgtgacatgcccaagttcatgtgctggtgggttgcagagtcagttctagagcccagttctttttggaaactggatcaatgctctttctacctcaccagctgtctcatattaatactagagatactaatgcaaaaacactaccataatagtatctgcaagagaacaaattcaagggaagatggatggatactggccgggcgccgtggctcaggactgtaatcccagcactttgggaggctgaggcgggcagatcacgaggtcaagagatcgagaccatcctggccaacctggtgagacccgtctctactaaaaatacaaaaattagccaggcgtggtggtgcgcacctgtagtcccagctactcgggaggctgaggcaggagaatcgcttgaacctgggaggcagaggttgcagtgagccaagatcatgacactgcacttcagcctcggcgacagagtgagactccatctcaaaaaacaaacaaacaaacaaacaaacaaaaagatggattgacactgcacctgcctgcatcagccaggctaagctgggttaagttgtggctacaccagatgtctatggcttcactggtttatgcaaagtcccctgtggggccaggtcactctccagggaagatctcatgacttccatgtcagcaggacttagggtgcactgaagagggaaagcagactgaagagctttgtcgaaagggtgtttaagtttggcagcccaaaaatgacagagaagttcatagccagtcacagcctgtgggctggctctaattgtgcagccctgcccgatgcacgggcggttgtgaaactgtgtcttccgagtgtgtaagaaggggagaagacccggaaatactggtgaccactagccatgagcaccacatggtctgcaggtctgagcggtcaaaagatctgttctgtggagcaggctcccctttaaccatgtccctgtcacagatcccgcggcaagcattcacaccacctggaattaatcgggaagaaagtcgcagtgtttagcagatatttcacagatataaactgtgcggtcttcctaagtctctgcacatgatcagctgaagattgggcttcttgtggtgcacataccattttcgtcattaaatccccaatgactcaccttgtcctgaaactgttaaagctccttagcaagactgaggcccatcctgatttgggccccgacaccctccccagtctcttctttcatggcacccctcctgtcatctgggtttgtgaagctcctttcagtcctctcaaaagagcgtttctctcttccccctctcgctctccgcacctgctgttccctccgctttgaggtatttcctcctcactcacgtccctctttgtccaggtctcaggaggcctgctcttgtatgtgagtccctagctagatggcaaaccccttggggtcagagacagggactcctggcagcacttgcccttaaaaacttatattcaggcggggggcggtgactcacacttgtaatcccagcactttgggaggcctaggcaggtggatcgcctgaggtcaggagcttgagaccagcctggccaacatggtgaaaccccatctctactaaaaatacaaaaaaaaattagccaggcgtggtggtgggcgcctggaatcccagctactcgggaggccgaggcaggagaatcgcttgaaccccagagggagaggttgcagtgagtcgagatcgtgccactgcactccagcctgggcgacagagcgagactctgtctcgaaaaaaagaaaaagcaaacaaacaaacagcccttacattcagcatagggcttagctaatacatggaagcaactgactactatgtgttcaataagcaaatgaatggtcgtgtgaatggataaatgaggtctgtgaagttgaatgcttgtctgggtgaggggacgtctcctggctcaccctcacctctgttggctgtgctgcaagctgtagtcaggatggtcattttccagctttgaccatgattgctcttgcttttggtgtcagcgcctacctgtatggtgccctccattcgtcagttgccttatatcccagcacgcttcctcaagagctgaagaaacgtcttacattttcatatgaaatcattttcaagcaaggtatagattcacataatacataattaatggtaaaatgctattagcattatgtacttaaattatttggctttaaggccaggcgcggtggctcacgcctgtaatcccagcactttgggaggccgaggcgggtggatcacctgaggtcgggagttggagaccggcctgaccaacatggagaaaccccgtctctactaaaaatacaaaattagctgggtgtggtggcgggcgcctgtaatcccagctactcgggaggctgaggcaggagaattgcttgaacccaggaggtggaggttgcggtgagccgagattgtgccactgcactccagcctgggcaacgagagcaaaactccatctcaaaaaaataataaaaataaaaataaattatttggctataatccccattggagttactgtttaatgggtagagagtttcagtctgagttgatgaaaacgctctggagatggatggtggcaacagttgcacaaaaatgtgaatgtacctaatgccactgagacccacacttcaaaatggttcaaggtacattgcttgagcctaggagtttgagaccaggctgggcgacagagtgagaccttgtctgtaaaagaaaaaaaaaggccgggtgcagtggctcatgcctgtaatcccagcactttgggaggcctaggcaggtggatcacctgaggtcaggagttcaagaccagcctggccaatgtggtgaaaccccgtctctactaaaaatacacaaattagctggacatggtggcgggcacctgtaatcccagctacttgggaggctaaggcaggagactctcctgaactcaggaggcggaggttgcagtgagccaagattgcaccactgcactccagcctgggtgacagagtgcaaaaaaaaaaaaaaaagaaaaagaaaaatatcagtcgggtgtggtggtgcacgtcgtggtcccagatactcaagaggctgctgacgtgggaggattacttgagccccgtagatggaggctgcagtaagccgtgatggtgccactgcactgcagcctgggcaacagatgagagagtaaaaaatggttcaaatggcaaattttatggatacttcgccacaataaaaataaatttctattaaagtacatatcattaattccacaaatgcaaatagaataccaatcaaaggaagtcctcagaacacagactgcacagtaaagtgtgggcctaactagaccacagcctgtttcatgtcaccaggcttagtggatgaccgcactgcaaggaaaattgctgagactgagtcatgttttggttctctggctgcttctattttttttttttttagatggagtttcattcttgttgcccaggatagagtgcagtggtgtgaacctccgcctcccaggttcaagcgattctcctgcctcagcctcccaagtagatgggattacaggcacccgccaccatgcctggctaatttttttgtatttttagtagagatggggcctcaccatgttggccaggttggtcttgaactcctgaccccaggtgatccgcctgcctcggtctcccaaagttctgggattacaggcatgagccaccgcgtccggcccctgggtgcttcttattttggaaaattcttccccaaatgagactaattttggctcagtagaaaaattctctcacctcttgtcccgaaggtgaaaatccacctcaatgattttcaatttttttttaatcatcatcggcctcttttattttttttctgatagaatgtgctttaagagatagttgtagcctgtttcctattcctgcatttataaagtaacaattcatttatccttgccagctgtctgcaagcttaaaatacctagacacatctcaccacccagtagtgtccttgactggcttggatggccagtttccctatactgatttggtacaattgctacattttatagaatacttaaatatgaatacaagtgtgatttctgtggggcttttgacaaaccagaactagttcaaggaccctcacaatcaccttcaagggacaaaaacctgcattttgtgtgtttcctggtgcgtttcctttaagagtcctggcgcctgggctgtccagcccgggtggagggactcccgagacctggtgatggatgctgtagtcaggagtgcatattggatctgttacacggtggtgatatacgatttcaacatttcagggttgatttggattttctgtactccctgcctggaattttcctgctgtgttgttttgtgctttactgttcaacaagaggaaaataaatctagaaacctgcttaaaaatagacatcctgttttcaattctctatcattaaaagatcttaaaagctagaatttagttctcttcccggtagaaggaaggagttgcgctaaggtcccttcttagaaattagctctagaaatcctaaaattctagctaaccaaccacagtgttcacgggcctaatatcccttacatttttcttgtctgacaggcccagagggctcactgtctgtgagctttcacggggttgttgctatcccccagggttgattgatctgtttattctaagcttgaggccagagctggaagggaggccgtttgttttgggcactgctgagaaaaacagactaatcacctaaataccaccttggggaatgaagttacttgaaaagaaactgaatggagcctgggcttttatttggaatgaggaggcaaacctgggaagctgcatgccgctgaatgatgatgaaaagcacaaagctactgaatgcctctggcttggccgccaaagagaattggtttctgtaagtgtcggagagggaagacccgcattccagagctgcacccctttcttcacatttccggtccctctcccccagctcctgcacaccctgatgctggaccaaggggcctgggcagaggtgggtgtgctgggcgggaaagtacgtcatggatgcctcaacttgccatggatggcaggttgacttccttcccagcaacttgcagatgttcagatgcgcagagttaaggtctaaaacaagaaaagtttgctaacgtagagtggccgctgggtcttatctttccgtcttcaatggccttgaaaaatatggggcacgcatggggatttcacactcttaacaagctaatgtctctaacactacaggttacacttcacctgatttccaggttagtgcagcgcctgacctctctccagaggcaccctcgtttagaagcatagatgatgcaaaaacatggtttctcttctcagttcagattgcctctgttgcaaggactgagaactctgaggagatctaggagatccctaagtatattaggttttaattctgggtcaaatcagcaaatgtttattaagtacacacaacagacagggcactgtaagacaaaacaaatcaatcagtcaacgtcaactcttgtcattgcttggggggtaaaggcaatacaaggaatgactggcaaatacaggtgtgaattccacttaccctcagcaagacgagggaagaagaagattctggaaagggagaattctgccagcaccaacctgatcatccttctgggcatggccaaatgcctccatttttcctctgaggggcttctttgccctgaggaatatacaagttgatagggctacttgccttcttgctcattaatatctgcttggctccggatctgcaggtagagcagtgctggaattatcccagagctgtgttgtgacctctggatgctagcctttccaagcagggactttgctgcgactccctaagttcatagggaaagcagcaaggatgagttcgggagactctggcatatgcatcagagttccagagtgaaaggtggctctgaaaactttgcaaactgtacataactcaattccccaggctgctgtgtgtccgtcatccctgaaatttcatgaggccagagtaggtcaacaggggctaatgagacaagatctaactaaacagagtaaagagtttctcggtcacaagggaaacttttactatttgaaatcagcctgagccaagattgatgaggaaaaaaaaacaaaaaccaaaatctactgcattttactcctatttaggaagaagtaaacttttgtaaacaggaagaacacagggatatttgctcttagctagaatggggcaaattggcaacagttttgggtgcctacggctttgggtttgatggagtcaacctgccactaaggaaatagacccaaggaggttaaactcagtagagagctatgggtattcctttcctttaagttacagctcccaggaaagcaaaacacaagctgaacaaacattatacaagccatgtatatgtgtagcatgtgtccagatccaattcacttatttgctcacgcttctaggaactccatccttgtgcttttatctcctgggctctctgactttgagacttttcacagctgtcatcatttagcataaataacagcctgcggaagagtgggtgacaatgtggcattttgctgggccacttcttgctcagcatttgtcgtggagtcttctgccattggccatgtgccaggcctgacaaacagccatcaacacaacttgtcaccaagtgattttgaaaacttattgttgaggtgacttcattcttacatctttcgtgcttggcaaagtaattactacgccaagttttttttttttttaatcaaaataaaacactgattaaatgttttcctgtatctggattacaaactattccgtgatctccaaactttgtcctctcgtgtgtgtgtgcatctcacacaatctctgtccttcttggaaaaatgtctccattaattactggggatgaaagttgattaaaattgtaggtcatttcccagggaggttttatgtgaataactttagtactgtgatgcactacttatgaaatctctggtctctttctaaaatcaggttggagaagaagagactgtgcatgacagtgcagccatgtggcttggagactatgtgagtggaagcattttgaggatacgatttctgagtccatgctatttctctgttgtagcttagctgtggattccttacgtgcgaatgatttgggagtataagaacacagactcagtgtcatcattttgtctaccattaccctttcctttagaaaatctgtttgtgtcattcatttagaatgttgccgttaacaaagtattttatgtatactattttatttggacattatgatggtccacgctgtgaggtcagccagctattgttcatatttgttccagatgagagactggaggttcagagcagcaatgtgccctgcacacctccacacagttcacacagtgctcagaacagcaatgtgccgtgcacaccacacaccctgttcagtgcagaggcagcaggcaggaccccaggacttctgagtcctgatccaaagctacttcctcaaaatccctttactactttattattattattttttaaatagactttttaaaaagcagttttcagcttatagaaaaaaagtgaatgaaaagtacagaattcccatgtgccgcctctcgttctcctcagtttcccctgttattagcatcttgccttagtgtgctacgtttgtttcaactgatgacccaatattgatacgttattgttaactaaagtttatagtttatgttagggttcactctttgtcttgtacattgtatgagttttgacaaatgaataaagacccagtgatcatgatcaagtgtgatttccccaaagtgagatgtgttgtccttcacagagcacacttagtgcagtggcggtcaatctaactggttttttttgttgttgtttttgttttgttttatttatttatttattttggtggcttagtctcctctgtcacccaggctggagtgcaatggtgtgatcttggctcactgcaacctccgcctcccaagttcaagcaattctcctgcctcagccttctgagtagctgggattacagacacacgccaccatgcccggctaatatttgtatttttagtagagatggggtttcattgtatcggtcaggctggtcttgaactcttgatttcaggtgatctccccgcgtcgtcctcccaaagtgctgggattacaggcgtaagccaccgtacctggcctgtgtttttcaaatgtaaacaaaaggccatcaagcagtgacagttcatctcctgacttcatttttattgtcacaaaagtgttctggttagaaagaaaaaaaatcacatatccaccattacagtatcacacagagtcgtttcactaccctaaagccccctgttctctctctattcatccttcccaccatccaccctcatccctggcagccagtggtctttttctgtctgcacagttgtgccttttctagaatgtcagatagttgtaaccatgtactgtgcctttaccaccatgttgagccttgatgtgtttccttcgttggttttatcaataacaacgaacattcactggtttctttccatcgaagttacattttttcatgaaggtaaactcttaaacaagtgtctctttttgtcaccctctcctaggcctattcttgctattggttagaatgtggccaatagattcacctcatggtagcaatgtccttgctgaatataacaaatctgatggttgtcatctaccaagaattttgtttctctgaggaaaatcagcaaaactctcatttcagttctagtgtagcctagccatgctaggctgttttgtaaatgatgactattaggagatatttgtatccattgagatggagaacaccgaagcttcgaaggaggaaacagcttgcccaagtaaagaccattaggagaacacaaaataaccaccaaggcttccttattcccatttgagatgctgctgattgagccgcaattggccagtgctctaaaaccgaggcctggaaaggacaggccatgccagttcgctcagccattcaacccagcagccctgactattgtagccaaggtgatggacttgattcccatagaaagcagcatcaccttggagctcacctttaactcctggaggctggcagggcccctgtggccacaactagactgtgagaggaaccaagaaagtacgttgagatcttggaaccaacccaaatgcccatcaatgatagactggataaagaaaatgtggcacatatacaccatggaatactatgcagccatagaaaagaatgagttcatgttctttgcagggacatggatgaagctggaaaccatcattctcaacaaactaacacaggaacaaaaaaaccaaacaccgcatgttctcgctcataagtaggagttgaacaatgagaacacatggacacagggaggagaacatcacacaccggggcctgtgggggatgggggataaggggagggagagcattaggacaaatacctaatgcatgcggggcttaaaacctagatgacgggttgataggtgcagcaaaccaccatggcacatgtatacctatgtaacaaacctgcatgttctgcacatgtatctgagaacttacagtataataaataaataaataaaaatcacacacaaaaaggaaagtacatttagatctcatctccctctcaccccaaatccaagaacagaacaactcagacacatgtcctacagatcagcacacaatttttttgtgattgaagaaacgaatactaacattggttgatggaagagacagtactctaaagtcagcatgataatggacagaagaacaaatgatgcatctagtaactgatgtttaacaactgattacctgtttgtatggcatatttaaacattattgtgttttctgctgtttgggtagtggttgtttataattattaaagatgccccgagtgacaaagagacgaaggatcatgaacatcttaaaacacttcttgctttttaacaagggcagagcaaagttgttaaaaaggtaaccgagggtcagataaccaatgattcattgatgatgaatgctcattcttctagtgccaatgtggtaaaatgtggatgtttttaaccttgtaagttaggtggcagcatagtctagtagaaaacacctctagctcatggatgaacgtttctccaatttgctcccaagtctcttattgatactatatttgggtgaccctgggcaagtcctattgatagttggctttgacttaggacaaatgaggttacacagactgagagttttgtgttggacttcaagtacgcttctagactaaaagcattatgccattaatatttatgttatatagcttgtatataagtatctctattcctattatcttattaatgttcacatgtatggatgtgtatacacgcatggatttgtgtagatatgtgtggttgtgacgtatgtattttgtgtcttacagttttgcaaagctcttttgcagacattacctcatttgatctttcaacagtctctcagaagggggatgtccttgctttcattttataaatgtggttgagagaggttatggttcctgaaacttgatacaattaccaagtttctgaaatataggaaaaataacttcattgtagacaaaggtcacaatttcaagaggctttgtaacgaaattatgaacaagtttggaaaaactgcaagaaattcattgaacaaaattaagaagatcagccttttgagaaaggtctctcttgatggcaagaccgagcagcatctttcactgagccacagatttgtatggcggattggatttctggggaaggttctcctcagaacagtgcccttcagtccaccggaaagtgccactccaatttttagttaagaaaggctctgaaaagacccactctcaaaggtaccacctgttcatgtagtcattaatttgttaactaattaatcgacccatctatttattcgcttattcactcaaaagcatttaccaagctcctactgtgtgtcctcaaggacatccagctgtacgggaataaacaggggaagcatatggtggacttgaaggtggagttggtgtggaccctgccgtgggtggatggaggtggaggtggggtggtcctgccatgggtggatggaggtggaggtggggtagacccttatgtgggtggtgggaggtggaggtggggtgggccctgccatgggtggtgagaggtagagttggtgtggactctgccaggggtggttggaggtggaggtggggtggaccctgatgtgggtggttggaggtggaggtggggtgggccctgccatgggtggtgagaggtagagttggtgtggactctgccaggggtggttggaggtggaggtggggtggaccctgatgtgggtgattggaggtggaggtggggtgggctctgccatgcatggttggaggtggagttgatgtgggttctgcacagcttaggctgagcaggaagtgtattttcagacctggaatagactccctatggtggacagagttgctggaaaaaatatcagaatatattgtttaggacatctcatcttcaagacatagattccccttcttatggaattttgagatgtcctagctggaggaagaagaattctttccatggaaacaataaacagtcaaaatgtttactatgaaattcatggaaatgctctgccagaggctcgggaatctctgcagagaacattttctgtactgcaggatgacagaggctgtcgagaataaaatgaagctgagtgcttgtggttgggattccttctttttcctcttttattgtttctccttagctttgtgcccaggtcatttgtctatcttccttcccttgaaatccctcctgctttggggccctgcactgcctctggagcatccagttctgagattccaatcacagggccaggcatgaaacacggccatccctcaggcacacggctgctgggatatggcaagcttgttaacacggcaggacaacccaagatgccatgttcctaaagaaaatgggggccgggcacggtggctcatgcctgtaatcccagcactctgggaggtcgaggtgggcggattacctgaggtcaggagttcgagaccagcctggccaacatggtgaaatcccgtctctacttaaaatacaaaaattagccaggtgtggtggcatgcacctgtaatcccacctactcaggaggctgaggcaggagaatcgcttgaacccaggaggcggagcttgcagtgagtcaagatcacgccactgcactccagcctggacgacaaagccagaccttgtctcaaaaaaaaaaaaaaaaagaaaaaaagaaaaaagaaagaaaatgatattcattgcccacctccttacacacatacccagagtggagttaatcctttccatatctgtgtacccatgcttctttatatatattaagttgaaccatatgaaattgccaggattcacgatcttgacctgcaaaaataggcagtttcatgtagttgcacctgctatgtgtggcatttgttctcactttcaccgtgagcgtcatttgttgactttagcttaaaaccaaccttattccactgcatgccaccttgtcctcagagaattcataaagacaggcttaagaatccatttcagctgggcgcggtggctcacgccagtaatcccagcactttggaaagccgaggcaggcagatcacctgaggtctgagttcgagaccagcctgaccaacatggtgaaaccccgtctctactacaagtacaaaattagcgggcgtggtggtgcatgcctgtaatcccagctactcaggaggctgaggcaggagaatcgcttgaacccaggaggcagaggttgcggtgagccaagatcgcatcgttgcactccagcctgggcaacaagagtgagactccatttaaaaaaaaaaggaaaaaaaaagaatccatttcatccagccttctgattctaggaataggaacgtcaattcaatccaatgaatcctgggacagcatttggtgtgccaggtagagcgtgtgtggcggagggggggtggtattgtttgtgacgtaggttttctgattggaactactgttgcaggcttgaccatcacctcccactactgcgtgtgaggctaaatgctgctccctcgcttattgctaaatggagagaatacgagggagacaatggggaacgtgaaagcaacaacattgtcaactggatttgatgcagggcagtgggcagggactcagaactccactccccctactcagacgggcaatcatgtcacagtcaagatgagaaatacccatcgagatttgagtgcatgtgactcttctaaaagtaaggcgtgttcttcacagcgcacactgagcaccgttgcagtcaatctaactgatgtttttcaaatgtaaaccaaaggcctcaagcagccacagtttatctcctgacttcctttttattgtcacaaggtgttctgtttagaaagaaaacaagccgttagaatattccaacagaaacagcattaacatgatttactaggtgggttatttagggttactcagccaagaaatggcatttctggacagtggtagatttgttcagcctctcacaaattgagggaagtggctttatttcttcccacccagctagttcccctgtcctcagcccagagattcaaatgccaacggctgccaagtttaccccaggaccgccaggcaaaggttccggaccactgtttgttttccatttctgtggcctcatcatgctcagaaatgctgacttctacgaagagcccagaaaagttcagatgtgtgccaaggctttggttgtaggcttggcacaaggagcagcagctggtaaggaccaggagacagcccggcctcctccatggtgcctgcctctcatagaagcagtcaggaggacaagcttttggtttccgcagacttagcagtcattcctgtgttcctaagaatcatactcgggattttaaaaattcatgtatttagttataactgtgaaatatcatagaaccgggaggtgatgtccaagtcatctggccagtccagtttctccttttgcacatcaaggatcaggccccaagaggccaagggattagtgggaacccttcttcttgccttcacatccatctctcagtctttgtttcctatcgcttacagttgtttttcacttctctcttcttttcctactccttaccatctgaagaactgaaaaaattattccaggttcagcaatgttggaaccaagttttgtaaacggacctaagccttttacaatctgggggaccttctttaggaaatggaacacagatgaccatgtatacatgttgctggcgcccctcctatggctttggaaggcacccaggcaggtgaggagccctgaatctcgagcttcctttagctttacagtgattcagtctctggttaggaccattacgatttctttctttatttcccccttacttatgccctatatgaaatgaaacagatgtgagtgtttgaatcaaaaagacttccctgatgtagtggtctcattttagatgctcagagcatagaataagtggcagcagaccttacttgttccatctggtttttgcatagactgctcgagttgtttttcctttctcatttgttttcctcccttgcattttggtctgtctgctccccaaacttttagctatgaaacatctctagaattcgacatctgtcagaggaggcagcggaagttctttctctgggatccatgagtcctgactcccctgatactgtgtgctgagagagggttttgttttcataattatgacaattcccatgtattgaatgcttcctacatgccagatatttccagagctctgtgtccctggaagagtcaagaaccactgtttatagcattgagaaggaaagagtctagcctctgacatcttttcttctaaaatgactgcaacacatggacatatttttagctattttttccatgaaatgtattttctaatgacttaagacattagatcaatgggaaaagagagcgtttatgtttttatgaaggtaatattttcagtggcaaaatgagctttatcagacctcaggaacttgtgacttccagaaaacaagaatggttctgacctgggatcgtgagaatgtctttatcctagacatgccaatccacacttagccagtgtgaagggaagagtctgcacttagccagcatgaagggaagagtggcagagaggggactatctgagtcctgtcacggcctgtcaggagagtgacaggtgagggtgggcaggaggtctccgaatgaactgctttgctggtaggctgtgtttctgtgtttagctgaggagagggcgggagagagacccaggctgggaggtgggggtgcctgagcctcctgtgccatttggagcatgtcattatgggggagtcacttattttgcaggggggaggggggtcccaggcctaacatttgtaaaattagggaatatgctgggactaagggttcgttgtggcctgcagtctgtttctatttatttattcatactcataaacatagatctctaatataggccaagattttgaaagaattagtagttgcaatttcaccttgtaagactttctcttttaggtaccttatattagttttacttgttagttacccagatatgtcaagcatagagctaaactgaatgcctgtgtatttgctgtaagcattgcctgccttaattcatgctgtgatgtggtgtggtttgcggaattcctagagtggccagtgcaccatgaccaccaactgacactaggctccttctagcaaagaccagggaatgtggtgatgcctttagttggtttataaaggactagcacccatgagcaggaaagggcacgacactcattttggcactgtgaccgccctcctggtcacaacgcctggtctccacactggcagggctgttcttttacaaggagggacacagggtttgagacaggtccagttgtcgctcatcgagaactcgtgaagacagacaggggagcagtgaccctggaaatcagctgggagagtccattcatccacgtagtgagaccgtgtctctgttgcggttcttatgtccacccacattctgtgattcattgtgtgttcttattagtatattataatctattagagggtatttttctctaattttctgtcattttgtagttctgtgcaaaaggcatgaaattgtggattaaaatgagggcatctggatattgctagaaaacaccagctgaattcacaggctcgcaaagaggtcgtatgtttggaaagctttagccattgctgtggttttctattttctggaggtggggacaggataggaggtggaccctagtccctagagactatttccaaagtgtgtttcccagttgggatcaattattgtttgttgacttggtctcaggattgggctgcgttctaactcgagaattgccaggcctcagggaagtgtctgcttttcagggaagtccgcccatcatctgccactaacacaagtcagagggccacggccatcaccagtgctgcaagtgggaagggcagagtggacttacataaacaccgtggcattcctgcctgcagctccggagctccaccctcatcgccactatctctccttggacttgaaccacaggcagatgaggccccaggaattagttgcacctgagagtctggaagtatagcccaaccctccatgtgtggaaggacagggtccagacccctcccgtcctgcttctgcagtggctgaatggctggaggccgccatgacacccctcatacacattcactcactcaccattcactcccactctcctgcccctgcccctttccaggctcccaactctctctctcatgtgtaccttgaaggtttgctagatgatatcatagtagacgctaacgaaatcgttgttaaataaacaatagagtgacatgtatacaatcaataagaccaaaaaaggtgtttaaaaaaatcttttatttttattttttaagagacaggcctcactccgttgtacaggctggagtgcagtggcacaatcactgttcactgcagccttgaactcctaggctcaaattatcctcctcccttagcctcccaagtagctgtgactacagctaccgtgtctggctaattgtgaaattttttggtaaagacagggtcttgctatgttgcccaggctgatcttgaacctctgggctcaaccgatctgaagtgcaaagattacaggagtgagccactgtgcctggcccccaaaaaggattttaatgttaggagctgagttatctgagcagacacagtccactgtctggtcccaaggctccatgtagaattgtctgcttttagcacacaggcccacctgggctggcctgaggaggaaattcaggagtgggagatgccatcttttcctagccaggaggggctgcagagcgtgtgggctgagactcttggggagggggtgtgaggggcagtcacatggcctcatgtgaaattctccataaagaatcccaggcagaaggccatggacaggcaggctggtgcaccgcatgtgtgaagatgagcagcagggacaacgggtgggtggggggagggagtgggggagggagcgggaggactagagggagtgggaggactagggaaagtggaagagggagtggggggagagtggggaaagagtgggggagggagtggggacggagtggggggactgggggaagtgggagagggagtggagggagagtgggggagggagtggagggagagtgggggagggaggagggagggagtgggggagggagagtgggggagggagtaggggggtaatagggggacagtcgggggagagtcggggagggagtgggggaggaaataggggggtaatgggggaagagccgggggagagtcggggagggagtgggggagggagtggtggagggattgggggagggaatagcggggtaatggggggagagtcgggggagagtcggggagggagtgggggtgtcggaggatgtctgatatattcactccttcctttaatgatttcaaatgaagtgctttttttaaaaggcaggctcaccaatgaggtgcgggaagtccccgcagagagagagcccacgtagtaagtaaggaacgggggcggttagagattctggagaggccggatggaaaatgcacacacggtgagcagaaaccatgatcctgagacgctgatgtccaggagggagcctcagagcaggaacgcagccgcggcagggggcggtgggagtctgcggtatgacgtagggtacgaagggcctgggggtggcagagcagagcctgctgcggaggcacaggcttctcattccgcgcgagtgaccgagacatggatcgcgctcttgccggaggagggtgcacgtgcggaccagaggcttcccagcgccacggtgccaagttgtgggggtgctgagccaggagcttcagaagagcctcacaagcagggcacaagctgagaaaaatgacagctcacgacactctttcttcatatttaaaccagaggaccaaacaactcaaggtgctcttaagaaaagcccgcagtcgtccaagactttaaatgaaaacgcggatctgaaaatgggtgaaggaaatttgaggtacccacatttgccagaacatcgcgtccaccctgaagtaaggtgctacctgtggtggacacctttgtgacacttcgtctctaagtgagataggatttccagggagcgtgggactgtccctggattggtggctgctgaggaaggatttattttccatggagctctagttggctgtgagattttaggtcaacaactggctacagatgatagatggagagatagcccctgtacaatattcactgtggactattattatatagtgcatagtaataagacaatgtacaaaatgtgatagcgtacacttctttcgtatgtagaaaatgcagggatttttaaaaagtgagatttactttggtctgaagtcctcatcaggaggccaggcgtggtggctcaggcctgtaatcccagcactttgggaggcgaggtgggcagatcacttgaggtcaggagttcgagactagcctggccaacatggcaaaaccccatctctactataaatacaaaaatcagccgggcgtggtggtgggtgcctgtagtctcagctagtcgggaggctgaggcaggagaatcacttgaatgcaggaaatagagattgcagtgagccaagatggcaccactgcattccagctggggcgacagaacaagactctgtctcgaaataaataaatagcaataaaaaatgaagtcctcatcaggaaatgcagtaagcagatggttatgaactggattacgctgctgcagaccgtcttctaagaccatttgtgtatcagtggttggaggagtgtgtaggccaacctctctttgaactgttgtaaattcattcaggcagatgactaaaaatgacataacccccacccgtctcccaagggggcaggtgagaggtgggtatagcatttcaggtcagaatgggggttctcacaattcatcagtgttcgctccccaaatctggatttacagtctgaaatgttctttctttagcctctgaatgccagaagtaagcacttccttttaatttttatttttccctagcaaattctttagtgagcaagcttttgtctgatctaacctttctctcccctgttggtttcagcctccacctttgtcttgcctttccccccaccacttactcccacccccactgctgacatgttgtgagtcgtctcctggaagccacagccctgctggttttcactcagggtggtgggtcccttatgtgtgtcatgctttgcacaagacagcgaggagtgctggctggtttgctggcgcccagcactatgacctggcttccgttcatggctcataagtttccagtctttggggtatctgtggcttttatgtcatctcactgcctctcctcggcacagggactggctttgctgtcgatggcagacttaaggcaagtgcagaagggaagaggactgctcagaaacatctcctggagacactgtattttcaatgggtctctccaaatccagcagaaaaagggcaaaatgtagggaaggggtgccaacatgaagccatcatggtggtgccaaggatttattgggcagcaagaatcaaaggactggtgggaaagaagaaatcagagtcagcatgcaggagaaaagcagaacggagacagtgtggctggattgatagaatactggaaggcccaacagatagtcccacacccatgttcacagcacattagccacgattagccaaaagagggaagcaacaccagggcctgtcaccgtataaatggataaacgagatgtggtctctacatacaatagaatgttgtttcagccgtaaaaaggaatgaaattcggacacacgctacagcctggatgaaccttgaagacatgatgttaagtcgaatcagccacagtcacaaaagcgcaaatactgtgtgacgccacttaggtgaggcacctagagcagtgaaattcatagagacaaaccagacgaagtagagtggtggtttccaggggctggcgggagaatgggcagtgagtgtttagtgggtgcggagtttcagtttgggaagatgcagagcgttctggaggtgggcggtggtgacggttacacagtcatgtgaatgtacttaatgccatggaactgtacacttaaaaatgattaaaatggtaaatttatgttacatttttacacacacgtgtgtgtgcacatgcttgtaactctccattttttatcttttgatcctaaccttgaacctctccagagccttaacttaaatatctcctcaggccgggtgtggtggctcatacctgtaatcccagcacttcgggaggccgatgccagcggatcacttggggtcaggagtttgagaccagcctggccaacatgctgaaaccccatctctactaaaaatacaaaaattagccaggcatggtggtgggcgcctgtaatgccagctactcgggaggctgaggcacgagaattgcttgaacttgggaggcggaggttgcagtgagctgagatccgcaccactgcactccagcctgggcgacggagtgagactccgtgtcaaaaaaaaaaaaatctcctctacgagtggatgtcgggtgaggtgggctggggtgggcgatttatttggggcttagaaggaagcagaaaagttcagtcatcttctgttacccatacagcaaggtacaagaaacaatgtgtgtgggagcagcaatggcctctctctctttttatttttcagaggaagtggtggtaattccttttagtgtcttgcattctacatgcagctttaaaatctacactgacatgtttcaagcaatctcataggtggctactaacttaatttgtgttttgctcattcctaatgcgcaggaatgttatgaaaatgttcgttcctggtgttaactaactctgttcagtccttgtatcctggttgattaatggcaaggtaattgcccttcatttctttgccttcaaagcagtgccacctaggtctttactgccctcaaaacagatgtcttctgcaaagagtgaaattccgatcagtcagtccctcctcataaaacatgtaggtgagaggccacttggatgcacaggaaggttgcaaagccagctgccctgcaggagccttcagaagagtgacctccatctggggtcagaccccggctccctggagggtcagcagaggagaaggggcatcttctggagaggagtatgggtgcggggcagacaaaggaacagaaacagaaacaatcaagaatgaggagtgagcctgcagtgcaccttagagtgtgtgtctattttctgccaagggtgagatgttctgagcattttctctatgtctacctccgtcaagtactttccataactgctgtcatgtcagcctcctactaaccctgtacagtaggtatgactgccgttccattttcatagatgagaccgaagggtaaagagggtagataactggaccgagtctacacatgtattaggtgtcggagttgggatttgaacccaggtctcatgaccttaagttgggcgagaactggatgtaatctggagtggccagcatgttccgctggggctgtgatttcagttatctgtaagaaagcatgaggcagctaaaaccactgaggcccagcaccagtgcagcatctctgatttccttttgccctgcttgtgtctggggacttcagactgtctgtctgctctctggattctgtggtccaactggcacttctgtgctaaaaatgaaggcataattgaggcatcacggaccccagatgggccctgcagcctggggcaaggctcagctgacctcatggcacccgtctcagtctaatccagtcttggattgccacttcccctttttggctttgccttgtcctcccctggcctggcatcccaggctcctgcttgtggtttacctgtgtgacacacacagacacatatacgcactctagtgccaaacatgacagaccaggaggttggttttcttagcctgagaatctgcatcatctgaatgaggtagaatctggaggagtctggactgtgagggaggaagcttgggaaggagtcaggatgggatgtgctgcccatcaacgcctgcagggaaagaagagtcccacgcagggaaaggagagtcccacgcgggaaaaggagagtgccacgcggggaaaggagagtcccacgaggggaaaggagagtcccacgaggggaaaggggggtcccacgcggggaaagaagggtcccacgcggggaaagaagggtcccacgtggggaaagaagagtcccacgaggggaaaggagggtcccacgcagggagagtcccacgcagggaaaggagagtcccacgcagggaaaggaaggtcccacgcagggaaagaagagccccacgcggagaaggaggagtcccacgaagggaaaggagggtcccacgaagggaaaggagggtcccacgcagggaaagaagagtcccacgcggggagagccccatgcagggaaagagggtcccacgcagggaaaggagagtcccacgcagggaaaggagggtcccacgcagggaaaggagagtcccacgcagggagagtcccacgcagggaaaggagggtcccacgcagggaaaggagagtcccacgcagggaaaggagggtcccacgcagggaaaggagggtcccacgcagggaaagaagagtcccacgcagggagagtcccatgcagggaaagaaggtcccacgcagggaaaggagagtcccacgcagggattgctgttccactctgcatagccgctgggctttctgctgcacggatgccatctagaagaagcaccatccactgttctcagaaagaagagagaggaaggagacaggagtgcgtagagtgagtgggccatcagaaaaaggactgctctggggatgcaggagacccgcttgtaggatttaggggcaccgtgcaagacaggggtcatggtatgcgggtgcctccgactggcggctgcgtggtggatctggccacttggtgaaggtcgcagtgaccttgatctgctctggggagggatgctgttttgcctttcttcacgcacgtggaatcaggactagctggactggcaggaaaaggttctctctggaataatggtttgcttctctgcaggctcgtgcggcggctcgtgcggagccctgtgagcactcattcttgggagagcacctgaagccgcctccaggtttagtcatttcctgctttttcctatacataccttccgtatcaacatgctttttgaccttcctcacctgaatacatctgataccctatgaattcttacctttctttttccaaagtggccaggaactgaaaatgcaacttcattaaactggaaagactggctctttgctaattagtccatttgaaatgaaactaggctaggatttttggttcacctcccagatcacaggaatgtattgcctcattaacagttgaagaagcagttttaaatgatccaagaacaagctgaccacttggattcctgggtagtcggctgggcctcctgtctttctgcaggtttgtgacttacctttgcttccatgggaagaaaggaggcgggaaatgaggtacaaagagaaaattggagtgagtgggcattttggtttatcaagtagaagcaattctgtgtgtatgtttgggaggatgtggagagcatttagaagttttatttatttatttatttatttatttatttatttatttatctatttatttatttttgagaaagtcttgccctgtcacccaggctggagtacagtagtgtgatctcggctcactgcaacctctacctcctgggttcaagtgatcctcctgcttcagcctcccaagtagctgggattacaggcacccccaaccatacctggctaatttttgtattttaagtaggggtggcgggggtcgggggttcaccacattggccaggctggtctcgaactcctgacttcaagtgatccatccacctcggcctcccaaagtgctgggattacatgtgtgagccaccacgcctggccattcatttagcctggtgacctagaagtacttaggaaatgtgtgtgtgtgtgtgtgtgtgtgtgtgtgtgtgtgtgcacccgtgtatgagtatatgtgttttggttttccaatctttggttcacgaatgtagtccatattcttagaactgactcacatataggaattcaataaatatttattgaattaataaataaatgactatggtgtgtgtgtttataggtgcacacacaaacacacacacagagtaacatctcacccataagtcatttatcgagcaaccataagtatttaaaataaatgacaaattagaaagtccagaagaccatgcagtggctgcataaaggtgacaaagctcatgcttgtgtttctttaaaagaaacttatcacccttcgcagccaggtctcctttagatagcgtgcttggccgggagcagatcagaaatggcaaactaaagataaagacaatcacaaaggcaaaaccaacaaagcgacagctaacagcttgacaggaagagaggggacagaaagcagacacagagtctctaagcacagccgtctggtttggggcaaacaactttttgcactttaccgtgcctgtggaaactatgtcatgcggcatggaatgaaattaattaacattcgtagtagacgctgaatcatcaaaagcttgaattatatctcataactttgtaggaagatgaagttactctagcaagattccttcaaaatggtttacttgtttcttaaagagtacaggcttccattatgtacaccaggaggcagaaaactgtggtcagcagaccaaagccagcctgctgcttgtttttgtaaataaagttttattggaaacaaccatgctcattcatttacgtgtttctgatggcaacttcctccttcccctcagcagaactgagtagttgagacagaaaccatatggcctgcagagccaaaaatacttaatggttatttatagcagaagtttgccagtccccaatccagatgttgggttcctcttgaatgttggtttgtgcttatgtatacatctgattcacttgcacgcattaccaagtgatccatatacacgagtgtgaacacatacgcatttctgtgtggtagtaagcacaactaagtgtgagcaccacattctcagacatagctctagaagagagtttctaagaaattagctctgagtcttttctgcttcagtcagctgatggcatggagcagtatgttgtaacctctgacccgaagggcaaaggccttctggaggaagtgtacacccctcagaagcctccctgtacattcaccatccccaaaatagctccttgagtagaggtgcatcgatcacccccaaagcttacataagatcctagcagtcagaaggattcagtgattaggtatcccagactacatagggtcttgtgggatatttcattggtactagaagttgactgcaatggcaagaaaggtatgcttcatagggtagaattttgcttttagggttttttttttttttgagacgtaatctcgctctgtccaggttggagtgcagtagtgctatctcggctcactgccacctccgtgtcctgggttcaagtgattctcctgcctcagcctcctgagtagctaggattacaggcctgtgccaccacgcctggctaatttttttgtatttttagtagagacggggtttcaccatgttggtcaggctggtctcgagctccttacctcgtgatccacctgcctcagcctcccaaagtgctggaattacaggcatgagccaccgcacccggccttttaggctattcttgtggcctttgtcactgacttaatggataaagtttcttctgctaaggcggccatgttggtttattattctgtacggatgtggctgataccacattagtgtgagctttcactagtgctcactttgatagcctccttgcacagcctagctaatatatgtcactggactccattaattttatagtgtcagtagcccagaactcattaaggaagacaagtttctgagattgtagattcctatgggtaaaatatgtatattatcataaaataggtactaaaacgtgatttggatttgggatgtggaagtaagtgccattttattattgagatattcatataccataaaattgacgttttaaagtaatttttagtatagtcacaaaatcatgaatatatattttcaccttgttttaaatataagaagattggttcattttgaagaattctgtgtgacccatatcaaagtagctgttgcagttgtgtagagattcacacatgtatgctctgtcaagatttaccagttggcatgtgtgccataggatttactgagtgtggattatgacagtcctaggtcccttgattttattttatatacatatcaaattgctcttccccattgggccgtgttggagaacaccagggcccagggcccaagcctctagcctaccccaggcccaggggtttgaacaacctccctaccttctggaaacccatttccccccaatactggctggaaggtatgaggagtcgtctttcttactgtccttatcactacaggaaacagggaaagcataagaaaaatgacaaaatgttccagctgagctagagtctcattggagggtacaattgtctctgagtatcagtggaagagtgcctccaggactcctacagaaactaaaatccacaaatgctcaagtccctggtataaaatgtcatggtatttgcgtataacccaggtacgtcctccggtatatctgaaatgatgcctagattacctataatacctaatacaatataaatgctatataaatagttgttattctgtattgtttgaggaataatgacaaggaaaaaaactctgtacgtgttaagtacagacgcaaccatccttttttttttttctgaatacttttaatccatggttgtttgaatccataaatgtggaacccacggatacagatggctgagtatgtactaacatataaatagggctagccttgcttttctgcagcccctgtccctaacatcttattctaagtggccctgggcaaagtgaccattcatttattcactcattcatttgtaggccctactgagagcctacgatgtatacggcaccatgtaccaggccctgagaacacagaggtaagatagacagggtcctgctttcatcgggtttatattccaatgaagataagaggcattcaacaactctttatctaatgagttgtacagcaacccttgtgatatgtgcacttaaagaaatgtgcaggggttttggatagaaaggctcaatgtggagacagacttggtctggaggcggggcagcttctctgagggtgcgacgtttcagccacgatctaagggagggaacagggaaatgcactgcggtcatccaggtgagaaatgatggtggcctcagtgcccaaagtggggacgtcagtggatgcagacagtggatttgagacgtatttaggagatggaattgactagcatcattttattgacacttttcatttctacagtttgagtccatcctcccatcctcctttcccaatcccagtgcctcagatgttctcgtttttcccttggggtgagtctatactgaagccagatggtttcactcaaacccattcagtgctccagagtcaagtgctggtcatcgcaggggagctccggagctgcgtctgtaatgttagtgaccctgatttctaaagggaagtcttcttcagtctgtttctgagattattcctgggagctttaactggaaaagccaagggcttaaaaagatgcagtttttttttttttttttttttttttttttttttttgagacactgtcttgctttgtcacccaggctagcctgcagtggcacagtatggctcaccacagcctcaacctcccagattccagagatcctcccatttcagcctccagagtagctgtggctacaggcacacaccaccactctcagctaattttttaaaaatttttgtagagacaagatctcactaggttgcccgggctggtctcaaactcctgggctcaagtgatcctccccccttggcgtcccaaagtgctgggattccaggagtgagccactgggcccagcacggtgcagtcttcagagaaggtgaactctctgggcacctagagaaacttgtagggaaacaaaagcttgtttataaacttggttcaacacaggagactatgttctccacattgaaaagttccttcatcttttttaaagcatctaaatgatctgtgtctcacttcctaagcaggctggtgggcagggagggtcaccagttggggcagagctcagagggaggtgcacagctgtgcagtgtctaagctcctgcgtctcctgtcacttggttcccgtggcaccatctacgcccatctccctcccccttaagggttagcatgacattgtatcacagggatgttgattttcttttcacttcagttctggattttcaaattctcagaccacataccaagttgaaagcaatcctttgtttcctcttgaaccgtaaaccagaaattgtgcttgggaaaccataccaggtgactaactggaaaacatccccaaaccttgttagtctttggccgtagacatttaattctgagccctggatggatggtgatattaaatacagattgtgcgcacattagtagtagaatgtacccctgaccaatttttcacacatttaaccaagtaaatggcttcttgccttcagtgagtttttatttcaagaccagcaaccattgcaccaagatgaagaagtgagccgcgtggttttctccatccaggggtgcagaaagaaaagtgcagagacagtcttcagtgtttttatataaattcacttttgcaaaaagtatgttgctgtgtaattaagagtgttaatgatgctgcctaaagcatctagggagagcagtctggacaaggagagaatgggaccgtcacccaccggtggctcctccgtctatggcctctagtcattttgctccctacctttcttctgaagtcaattctggtttttgtttttgtttttgttttttccctatttttcccaaagacccggggctggaggcctgtaaagggaccatgctacaatttctgagcaatccagtctggtttaccagaattagaactcagtactgcagaaccctgggaggtgatgatgcaggtcaatgaggccttggcaagaagaaggggagggagggaggatggagacgtcaacctgacataggatttggagaagagtcagagattaagaatttagattaatgtgccaggcgccgtggctcatgcctgtaatcccaacactttgggaggctaaggtggcagatcgcctgaggtcaggagttcaagaccagcctggccaacatggtgaaaccccgtctctgctaaaaatacaaaaattagccgagtgtggtggtgggcgcctgtaattccagctacttgggaggctgaggcaggagaattgctttaagctgggaggcggagcttgcagtgagccgagatcacaccactgcactccagcctgggcaacagagcgagactccatctcaaaaaaaaaaaaaaagaatttagattagtgtttattttggaaagggagagccataaatatatatttcaggtgtctgtcttcactataagtttgtttatggttgaatttgataaatgacttcctttggtctgtggagtgtattagttatttgggtgtgatgtgttggaagaagatagttaatgcatttacaggaggatcatgtgagatttcagatcagggccacctcatgcctttaatacataaaaaccatttaaaacattaaaaagttccatgcaatcttttttttttttcctaccacaatttatgtctttatgaggaatatctccattctgcctctgctctgccagggtaattattatcctgtatacactcaggtctgtgttcaaatcagcataacgaaggctgctatgaaaatgaatatagaattttcataaagttcatgctaaattcttaaactttagcttttacatttttggcagtaggttataggtaggagtcatctttgtaattgacatttaaacgcaatttttcttctcataattgataacgacttcattcgtgccagccgcaaaacccagtgtattattcttgtcagtgcttgacggttttgacaggccagaaaaattgcaagtaaaatagatatatttgggcgtgagatgttgacttataattcatgaagctgcaaccttccacctgtaaaggagaagaattggcagaggtatggttttgatttatgtgttgaaagacagaaaacaaataagaaaacctttgttctgctgtcacaactgatgaaggtaacagtgttaaaaaataatgaaattcacaatacttcctacacatccagtcctctgtagctgcaattcgggggggccaagggcttccttagcagaatctctgggctttcttggggtgcaggtagggctctggccttgctatgctttaactagaactactgtgattttttttccttccttccctccttcctccctgcctcgctgcctccctccctccctcttttctttctttccttctcttttttcctttctttctctccctgtttctctgtctctccttccccctccctgtctccctccctatctctttctttccttttcttttttctctccctgtttctctgtctctcctcccttcctccctctctcctttctttatttttcttccatctcttaatttcattcattcattagccttctgtgtaagattttgtttggaaaaaaaagagtcatatccccctttaaaaacagttcatagaaatgtatcctctagtagtcccagctgctcgggaggctgaggcaggagagtggcgtgaacccggagggcggagcctgcagtgagccgagatcgcgccactgcactccagcctgggtgactgagctagactccgtctcaaaaaaaaaaaaaaaaaaaaaaaaaaaggaaatgtatcctgtacatgaatgtggataatgagctttcctggctggaaaagggcaatcactctggcttctgggatgaccctggagtccttctctgcttcagtaattgccacactcctgggctccgccacttctctattgcccagttcttctgctgggatgctggccttccgccaggcagccttaggttctgcttagacgcacagataatctttaccagtgtgtgagaagcctgaggatacagacagactgcataccgcggccatgtgttgtgtgagtggtatcaggctggacgtatcccttgacaacttgactttttagctcacagttacatttttcggactgatctacgttgattcgtggaaaaacaggtgataccgcttctttccttctatcccccggcttcagttgagttcattctataccccacccgatgcctccgcgtacacactgtagctaattctgcaggagatggagggttccatggtatcttcacacgtggagatggcactacattcgtattctgagctattccccagcagcaagggtaaattttcttctcttgcattctctcgctcagtcaaccttgtgaccattgactcatatttgaatgtcatgtttgggccataggcgcaagtgaggagatgctcacgctggttaccttgcaggtgttttctataatgaagagcccacaagccctcaccccacccctgccctacccgcagctggagtgaaggtggcgccccagaggccactcctgggagaaacctcatcccctccctccttctgcgacttcacagcctcacacacagttgtctgggaaacatcagatctaaccacctcgagccttgcgtctctgtttatgcctctcccaacaggaagctgagactcggaaaatcctcgtccccctccgcacctctctcctactcaccacgcctttccacgggaacacacagcacgttatcagcaaaattccccacaccctcagcgcctttcctgagaggtcctcgtgatggtgtggatctgtgtccctgcccacatctcatgttcagttgtgatcccagcgtgggaggtggggcctggtgggaggtggctggatctcgggggtggtttctcacgaatggctaagcaccgttccccttgctgctgttctcgtgatagtgagtgagttctcgtgagatctggttgtttacaagtgtgtggcgcctccttccttgctctttcttgctcctgctttcacggtgtaaactgcctgctcccactttgccttctgccgcgattggaagctgcctgaggcctccccagaagcagatgccaccatgcttcctggacagcctgtagaaccgtgcgccagtgaaacctctcttcttgtaaattccccagtctcaggtatttctttttctttctttctttctttttttttttttttgagacagagttttaccctgtttcccaggctgaagtgcagtggcatgatctcggctcactgcaacttctgccccctgggttcaagcgattctcctgcctcagcctcccgagtagccgggattacaggcacctgccaccacacctggctaatttttttttgtgtgtgtgtatttttagtagagtcagggtttcaccatcttggccaggctggtcttgaactcctgacctcgtgatccacctgcctcggcctcccaaagtgctgggataacaggcgtgagccaccgcacctggccctcaggtatttttttatagcaatgcaagaacagactaatacagtccctttaccttatcttcctaactgctccccgaagtcctctcaagccacatctgctttgtccccacaccctgaaccaccacgtttggtgctagcgcctcatcactgctccatgatcatccttccctcctcctggagacccctggctttgcatctctggccaccagatcattgttgcagtcatctattcatctctgatccatgccaccttgttccttgtggattgacgctcctggagtgctatcagtacaccaaccctacttgtcagacagtaacacctgtgatttcagtgttcttgtagacaatccttcggtactctggcttctcaggtccttaatctcctcttctccgatgaccttgttcttcactcaacctcagccccccatttccgtaactataccctagagcttattaccggttgtaaagactgataatgcagtcattatctgttatgctccagctccatcatctcatttcaagcatcccattctctgatcaccacctctttcttctctcctaaaaccttgactgaaaacaattcttccacctcactgaagtgcaaaatccatccatcctatcatcttttccccctttctcacctacctcatgtcttcatgtctctcattgtctagtttggagtccttgattatctaatcattaccttgctttactatcttataacattaacttctttacccatctctctcttcatcccactctccttgcaaaactacagccttggtaaaatccagttgcccatgtcctctgtacctgtctgtgcccagctgagcctgggtggaacagaacacagccgtggtgactgtttccagtttatgaccattaacttctagtgggctcgagcaccctctggcagagcgttctcctctttctgtatcatcatttcttctctcttgattgaatcactccttttagcatacaaaaatgctattataactcccaacttaaaaaataaatttctcttaacctcacacatctcattaactactgtcccctttcttttctttctttctttctttctttttttttagagacagggtcttacctgtcacccaggctggagcgtagtggcgtaaccacagctcactgtagccctgtagccttgaactcctgggctcaagtcatcctccttcatcagcctccaaagtagctggtattacaggtgcatgctaccatacccggctaatttttaaattttttttgagagatggggtcttgctacattttccaggctggtcttgaactcccgggctcaagcaatcctcctgtctccccctaaacggatagcaggcgtgagccactgcacttggcctgttccatttctttgattatctttgcagcaaatttatttttaaaatgcgtgtttatactctctgtttccagtttctcatctctatcctctcttgaacccactccatttatcttttagctgccaccactcaatcaaaagctcttatgaaggtcactgatgataatcaagactaaataacatttgtaatagataataattgtaatctgatcattataacacgttcattcattctacaaatatttgttgactggcacctactatgtgccagttactgttctaagtgttttacgtgtattcacttgcttaagccctaaggcgggtaccgttattttccccatgttatgggtgaggaaactgagaaacagagaggttgaagaatttaccttctatgccataagtggtataaaatggtcagttctcagtcctcattttacttgatctatctgcagcatttgcccgtagatcattccctccttcctggatgactttctttgccttgttttctgaacatcactttttgatttctcctttgagctcactacctattccttctcaataccttgtgctggtttcctctcatctgctctaaataaatcgtggaatgatcattcatcagacctttgctctgcctgcactgactccctatgccatccctcccaggcccgtaacttccaatgctatcagtatattattgatttgcaaaattgtatccctagcctggaccttgaccctgaacttgagactgttggtcttagtctgctcaggctgatataaaaaaacaccacagtctgggtggcttataaacgacagaaatgtatgtatttcttacagttctggagactgggaagtccaagaccaaggcaccagcaacttgagtgtctgaggagggccctcttgttcatagatggcacattattgtgttttcacacagtggagggggcgaggaagctctctgggtcccctttctaagagcactaatgtcattcctaatgactccaccctcatgacctgatcaccttccaaaggctttacctccagccatcatgttggggactaggtttcaatatatgaattctgtggggcaacaccacgttcagtttacagcggtctctctggcctcatgtccaaccatctcccctcctcattcatcccactccagccacgccggcctcttgctgttcccagttacgccaactcgcccccacccagtccttcatgtctgcctgctcccctgcctgggtcgcttccccacgatgcctgctgtggctcacagcctcactgccttccggtctctgctccagtgtccctgaatagagtccaactctgagcatgctgtggaaaagggcctcattccaatacacaaagtcccttttcccatgccctgccttactgttctccataggtcacatgtgacgtgacctgtgtgtgcttgtttactggttttgcttcagaagagacctccgtgagagcagggaccttggtttgttcatggctctatcgcacaactgggtataataggtgctcgataaatattctgttgaatgaatcaatgaagttgccacagggaaggcatagacatatgtctttcaaaactccatgtgcttggtctttttaaaagtaaatttctttgattgtaaatagattcacattgatacttgaataaaatcataaaggtatgtcttctttcctcttcctttaagttttaagacacttataaatgtacctgaaattgtaataaaagatcccagaggattttacagcatgttttccgttgatggtaatggatggaaataatttaaataataacattaacaggttgttttactacaggaccacaataattttaaaagacaaacttgaataatcctgttttaccacatccctaaacctatgaaacacacagtactcactcattaatgttgatttgtttaagagaaataaacttcaaaaaaaaaaaaaaaaaaaagccaacaaaactcactctgatattaactgcctcgggtttaaaggttttttcagaatgcctcagtaatactggcttaatgaattaggttctaagaaaaatggccaggcatagttaacaataaatcaggttatactatttgcagaaaaagcaactaaaactctccttgtaaataataatgtggaaagatctggtattaatcaagccactgtctacagctgagctctgttttcagcttctgaacacagtggagttaatattgagcatatctttgtttcaagtataatgaacacaattctgcagtcctttgagaacaggcttttgtgaaaaatcagtaaggaattgcacctaaaacccatttacaagatcatactcccaaaggctttgtcttagagcagtttttaaaatcttgttggtaacctcctgaccacatcattgggagtacaaaaaagtgcagagagtatatatatatatatttttttttcataaatacttgcacatcacatttcccctacggaaattcaaccagcggttccaaagactgctgggctggagttgtccgggttggtggacccgcctgagtctggggtagcttagcttgttcagaggtgtgcacagggctgaggaccttctgtgcgtagcagagtcattcatctggtcaatggccacatgaagacacagatcttgccatatcagattctccttctttctactggaggtctggtgactttacctgtgttagttcaggcacctctggataacttaaggactcaccaagcggcaggtccttatgtagctccacagaccaccatgaaacccttcgaccttttctgaagtctgccttacgtcttgggccactgaacattctgccagtcctgaagaacgtgttgattccagtctcatcccagtgcaaagtgtccttctcatctttgggctgctgtcccctgagcaggaatgccgtccccacagctgatctttgaccatgggtagactctggtctaccatatgacctgggaccatcaaagcccaggttaagctgcatcccaagtgtttttctagccagccatgccctgggggtactttccattttattggtcacggagcactcaggccctgctccaggatcccaggtatggtctctggggaaaactgaccacaggttgtgcaggaggaaccaccagacctgcccgagaggggacatctcttctctttggtctgctgctttgagacaattccaagatcgcagtgtatatatgtgtgaagtcttcatgggtaactatctccaaagcatttaatgattctctttccttggcttataagtaggctgataatggaagttcaaatgatgtgggactctgttggtttgtccttctggaaaatcccactcctcttcctggtcaccaaagcagtgaggggaggagggcaaggaattgactcctcacatgtattctaacaagcatggaacagagcacacaagacatggatcttactgtagaccggggaagacactgagccacttctggctttatctcttctgacctatgcattgggataaacttagctgagcgcgtttccctgtccgcatggagggtctggaaaatgagccggacattgagctgggcttcatactttcatctttgcctctctctagagccaaacaaaggcttacctgggtgggccctttttggtcctgtttttctgtcatcgctgttgatacgtgggccttgagctccctagttgcaaactgggaagtgcattgaatgagaagtgtgtggcttcttccctggctatgccttttcacgtgttaaacatagggaaaactcagctatgccttttcatgtcttaaacaaagagaaaactcagctatgccttttcccgtcttaaacatagggaaaactcagctatgccttttcacgtgttaaacatagggaaaactcagcatttgtaataacatgttatgtttatagagctcttcacaaagtgctttgatgtctgtgattccatttaatctttacatcagcagcaggggataagtgttatcccagtcttactgatgaggaaaccaaggctcaagaagattgaatgatttggccaaggctgtgacactagaaaaggcaaagcttggactaaaacccaggtcttcagaattcaggtccagagctctggccagtctgttgactccttcatcagctcccaagatgaagatgaggagctattttctgttttgagcctttgattacagcttgttttgtaatacaccataaaggttgagaccatgtttgtttctagcacttacaaaaagacctggcccaattagacacttaataagtgttttataaatgaatgaaattagtgagtgaagaggtaaatgaatggatatattgaatgaatagattaactaggcaaaaacctacctgtctgcatttatattggaaagcactacatgaaaaaatgagatttgaaagttttagaatgtggctgtgtgtgtgagagagatcgtccctcaatctttcatttcttctgattgtctatcagtagggaaggtccaagtcccacccatactgtgtttctcaaatattctcaaattgtattgaaacctgtaaccaaaaccaaagttaaaattgattttaaagtgtcttctaggtttttattctaccattcctacctccagttttttgtttgtttgtttgtttgtgttcctttttgagacagagtctcattccttcactcagactggagggcaatggtgcgatctcagctcactgcaacctccgcctcccaggctcaagcaattctcctgcctcagcctcctgagtagctgggattacaggcacccaccaccacacctggctaatttttgtattttcagtagagatgggttttcacaatgttggccaggttggtctcaaactcctaactgaaagtaatccatcaaccttggcctcgccaagtgctgagattataggcgtgaaccactgtgcctggcccacctacttccagtttaaagtcacctgggaaatacttggagtacagttttgtcattttaatccttttttggaccacaacaatcactttacgaacatttttttaactttttcagaatcgattcaaggaaaagtgatagaggcaggtggggacggggaggtgagttttcttcgcatttttgggaatctcaactcctgagcctgtcttactagtacgggttccccaaccccacgactagaactatcttagtggtttcttcctaaagagatgtacacgtgtgtgtgtgtgtgtgtgtggtgggcgtgggtgggtgtgtagagtagggaaaaggtgagaagtggctctcttgctatagacttttgctttttactcttttccactgagtctgctcatattattcatacgattatcacgttagaggttttggagttgtagtggctatcgttttaagtttcttgtagaattaatttatataagtagacaatgtatatgaattgattgattcaaatctgtatcttacaggatctgttaaagatagtcagaaggctgtcttttaaaatgtgaggacaaatcagtttaacagtatagcagagaagtacagctgtgctctgtcaaactctaggctcctgtgtgttggaatgactagaggcagcagggagaggggtcctggtttactcaccccctctccctctttcacatactagcttgggcttgttgtggttgaggtggtgtgggaacatctagaaggttcattcaaaaaagacagcctcagcctttgctcagacgctcaagatgttctgccggctctccctaccatgaaagttctctgagaagccagtaaagatggcagcctctaaagaggttagctttatttggtggaggggcggtaggggtggcacacaccgaggaagattcggatcgtggcacatccttgtggtcaggcccagaaatcctcattgccctgcagccacccaggtcatgattcatgaggtgggggtctaagctgagaatggctggccggttctctgacttcgtgggtgtgtaatagttggttgcaactgacttctcaagaatgacagttactgactggagctggcagagaggtgtggccaagttcctggagaaatgcttcctgctcctcccgccctccccaccaccatcctgctgtatttaaagctgctttggtgatgctttgctcatctcagtgaattttcagttcagaccttttcactaaggatcattatggaagaaagaggggtaagaagtgtggctgagtagcctaggattaattcatcagtccccaaataagcaaacacgatgtctcaggatggacggtgaaattctggacctcacaggtaggtcttggagttgttagttgtgaatgtagacccccaagttcagatgttgccaggattttacatcctctgcttaaggctgtgttgttatttctgatgtttatgagtgaaaacaaaaacatacagctcaggtccttatcctctgagggtctcctcagcctggggcacctcccgccaaacgcttcatgactcccccaccaagcacatcctggcacaatctggcatgaggtctgagctacataaatgtggttttatgagggaacaaagcaagttttggttttctttagaattgtacgaaattataccttcaagatgactttgccttatcgtggcttttgttttgcttctccgagaaggaaactacaaagttaccatgatgtaaatccggccagaggcttgaagtgatttcatagtaaaagccacctcagccgtcccctctgaaacccaggccaagaggcagagatgccaatgacaggctctgtgaccagcctcgtaagccatgaaccagatccacggtttcacatggccaggacctcagggccgcatcagcctcttccaccacactctctcgtgaacagctggtgacactgtcagcggcgcctctgtcacaaggaagggcaatgtcctgtgtagccagatggcgggggagttggaggctgggccaggcggtcaggatctgcattccaccagcccgtggggttttcatagccaggggcactgtgtccaccttgggcgtggccatacacagccaccacttctaaccccattgccagctacaacggaagagagcatgctgtttagagttcagtacctccacataagggaaactgaggtagaggagagccggcattagcttctgggcttagaacacccaccttgccctcctgcatcgagattcatctccagtgagagcaggtgagaaggaatcagaggagagcacctaggcccgggtgtcaaccttgaccccacggacatctaggactggatgatttttattttattttatttatttatttatttttgagacggagtctcgctctgtcacccaggctagagtgcactggcgcgatctcggctcgctgcaacctatgcctttcaggttcaagcgatcctcctgcctcagcctcctgagtggctggggctacaggcacccaccaccacacctggctaattttttgtattttgtttagtagagacagggtctcaccatgttggccaggctggtctcgaactcctgacctcaggtggtccgcccatctcggcctcccaaagtgctgggattacaggcgtgagccactgcgcccggccagtgattcttttttcaggtgctgggatgcggggtgctgctctgtacagtgtatgatgtctagctgcatccctggcctctactcactagacgtcagtagccctctcccagttatgacaaccaaaaatgtctccagatatttcctaatgtcccctgagcatcaaaatcaccatctccagcctgggcaacatggcgaaactccatctctacaaaaaatacaaaaatgagccaggcatggtggtgtgcagctgtagtcccagctatttggaagcctgaggtgggaggaccatttgagcccaggagagtgaggctgcagtgagctgtgatcacgccactgcatttcagcctgggcaacacagtgagaccctgtctcaaaaaaaaaaaaaaaaagaagaagaagaagaaagaatttaaaaaacttaccagcggtcaagaaccattggagtagagagagaatttggtgaaaagacatctgcattctacctttagtctctgggctatgtctccggggctatttatcattgtcttgaattattttgtataataagcagcagcccccacgctcaggtgtttggaggagttgcaattcactgggtggagggtagagcgtctcatgaaatcctcggctcctgtctgaaggccacagctggggtgaggcccttgaatgggagaggcagatgtccctgtctacttcttccttctccctgcctcctcttggccttccttcccatcccctcctctgtgacagcacaccacaccgtcacctgggtgctcgtcagcacgcagattccagagcccggctccccagagattctgatacagggggtctgagaggggacctggaaacctgcctcactgtgagcttcccaagtgactctgcgcagggggcgtggtgaggtcacactttgagaaacaggccctagaggcttttctgaacacacgagccctcccagtactcccaggacactaaagtgtagcagaaacaagcaaaaaaacacaactatactagcaaacgtgacaaaagcaaaaagggataaaaattcctaagaaaggccaggcacagtggctcatgcctgtattcccagcactttgggaggctgaggtgggtggatcacctgaggtcaggagttcgagagcagcctggccaacatggtgaaactccgtctctactaaaagtacaaaaattagctgggcgtggtggcgggcgcctgtgatcccaaggtactggggaggctgaggcaggagaattgcttgaacctaggaggcagaggttgcagtgagccgagattgcaccattgtactccagcctgggtgagagagtgagactctgtctcaaaagaaaaaaaaaattaaaaaattcctaagaaagatgaagctattcaatgtgggaacctctctcactgaaaatggattcatcgagtcattgattgattcgacacatggcttctgtgtgcctacttgacttcaggcattattctaggcatgacgcattccgcagtgaacaacacagacaaatgtgcctgctgtcacctagtttatattttgcagggggagacagacaatgaacggaatgtagttagaaggtggccatgctgtagagagaattaaagcagagaaaggtggttagggagtgttggggctagtttgcagtatcactagatgatccaggaaggcctcgttgaaaaggtgatccttgagaccttgaaggcggtaagagatggccaggcagatatctgcaggtgagagttttctgggcaggaggaacagcaagtacaatgtcactgagctgggagtggacattcctggtgtgttcaaggaacagccagaaggctttcatggctggttcaggctgagtcagggaacaagtgtaggagctgagggcagagagggaccaggaggccgagtcctgcagagcccatggcagggacattgactttgactctgaaggaagtggggcgggggccaggggaggattttaagccgaggactggcaggatcagatttaagattgaaaaggatcaccttgtctgttttcttgagagtggactccaggtgggtaagagtagaagttatcattactattcaaattatggcacggtttctgccccctaggaattcactgtgatggtggagatagaacatgtacagcttaagtaaggaaatgtttgctaagtgctatgaatgacttagagaagtgctgtgtgagtcagtgaagggagacatcccttctgggagtcagacttcgcggaagagcggggccttaggatgaatgaacaagactttggtttttttagtgtgatacataattcaccatgcacatccagtgaatggtacacatttaaagcgtacactttgatatttttggacatatgtatccacccatgacgctatccccacaattataatactgcacatatccatgacccccaaaagttttctcatggttgatgagggagagagggagttatcatcagggcaggaaccaaagtgaaggtgcagaggctgggaaatgtaggggcttccatgagacagagggaggctggtgctggtgctcctgggggaagtgagggacgtgtgacaaggtggcctgaagaaaattgtgtggggcccaaaacactgggtcacaggggaatggggcaagtacttaaatttttgtaggacatggtcaaatgatgtatttgttaaaattccatcttttttcttttttgtgttgagacatggtctcgctctgctgcccagattagatggcagtggcgtcatcatagctcactgcatcctcagcctcctgggctcaagggatcctcccacctcagcctcctgagtagctgggactaaaggcatgcaccaccgcacctggctaatttttgtattttttgtagttgggatttcaccatgttgcccaggctggtctcgaacttcagatctgcccacctcagtttcccaaagtgtggggattacaggcgtgagccaccataccctgccaaaattttaccttttaaaaacaatggcaacaccaccaaattttaggtatttaatctttttgtagtaagtttaagaaaacacagccaagggcggatcatgaggtcaggaaatcgagaccatcctggctagcagagtgaaaccctgtctctaataaaaatacaaaatattagccaggcgtggtgatgggtgcctgtagtcccagctactcgggaggctgaggcaggagaatggtgtgaacctgggaggccgagcttgcagtgagccgagatcgcgccactgtactccagcctgggctacagagtgagactccgtctcaaaacaaaacaaaacaaaacaaaacagccaagtacatttatgcagcatttcatgaatatgaagtcaattaaaagaaaaagaaacattaagcaattttataattagataattaacagaatccttgatagccttatactaatacaactacttgcagattgaaaataattccatttgctgcctgctggcacattaaagcctacatgtaaaaaatacatcaagtctagatgggcttcagtcatttgaaagtaatattttagtgcattctagtataatcttgattagtgcttacatgcgtatagttcagcactttattttgtgtcatgttgaacatgaactttaaagttaagggaaacattttaagtacgtagtaggaatctactttcccatcttaagctctgaatctatttgtgaagggatcctatttcccaacagccaagggatatactggagaacaagattttcagggttgaagatacgctgatgtgaaatcaggtttctctctctttttttttttcttgagatggagtcacgctctgttgctcaggctggagtgcagtggcgcagtctcggctcactgcagcctccgcctcctgtgttccagtgattctcctgcctcagcctcccgggtagctgggattacaggcacgcaccaccacacctggttaatttttgtatttttagtagagacggggtttcactatgttggccaggctggtctcgaactcctgacctcaagtgatcctcctgcctcggcctcccaaagggctagggttgcaagagtgagccaccgcgtccaggccaggtttctctttctacatcttctgggaaaaggttggcagctcctaggagatactgaccagttagttgatgggtctgtgattcaaatcgaacatctagcaaagcccctacgaagcattagtcactcttgtgggagaaatgaggaagcgttttcagtaggctgttagagtgagaagcatcagattcttagttccatggaaatgaacgcctcttggagtgtttcatcttttaaaatagagaaggaagctgagagtcattcaggccatgctcagagatgtcagctcaggaactccaggaacccagtattattttgattccttccttccttccttcattccttccctccttccctcctttccttacttccctccctcccttccctccttccctcccttccttccttccttccgatatgggttttcctcatgttgtccaggctggtcttgaactgctggctcaactgatccacctgccttgctttgggctcccatagtgctgggattacaggtgtaagccaatgggcccagcctattgtgatttctttctttctttctttcttttttttttttttctgagacagggtctcactctgtcacccgggctggagtgcagtggtgagatctgagctcactgcaacctctgcctcccaggttcaagtgattctcgtgcctcagcctcctgagtagctgggattacaggcacctaccaccatgcccggctaatttttttatttttaggagagatggggtttctccacgttggccaggatggtctcaaactcttgacctcaagtgatccacccaccttgacctcccaaagttctgggattacaggtgtgagccactgcacccgggctgatttaagagggctttgacttgaccagatgtggtggttaagtgaatatgatatgttcccttctttatcatcctctctgttcttaattgcaaaagcgccaaatcctcctagataaaagacagccctaagatcattgtcaccatcctccttatcctcatcccaacattatatgaagttctaaatttatacaagttactgtattagatactgagactagttacattgataataattactaccatttatttaagggtgataataattactaccacttattcagcatttaccaagggccaggtctgtgctaaaaatgttgcacatattatcacatttaattcttacttaactcaataaaataagtatgattattgactcccatttttacattaaggagactgaagcttagagagatttgtgaaaaatggctcctggtcactcagctactaagtaatagaagcaggacttgaacctcccatacccttaaccaaaagttttcaaaatagtcaacactgtccataccatctagttggaaaagatgagacctggacataaaaactggccaggcagagtggctcacgcctgtaatcccagaactttgggaggctgaggtgggcagatcacctgaggtcaggagttcaagaccagcctggccaacatagtaaaactccatcggtactaaaaatacaaaaaaattagccgggtgtggcggtgaacgcctgtagtcccatccacttgggaggctgaggcaagagaattgcttgatgcagtgagccaaaatcacaccactgcactccagcctgggcaagagagaaagactctgtctcaaaaataaataaataaaagcattttcaggggttgtgacgagaaatgcctcacccattcttttgagtcatttatgaactgttcttaatcatgttacgttctaattaaacatctcccttttcttttgacgtggaaaagtctttaccttctgcaatacctttttcacatgttgcagcaagcagccctattaatcgcattcccacctgcctttggccctcccagctgcctcgcttgcagaacacgatcgttcaaacggaagtcattcatgggatcgcctctccctgcagtaatccagagcagaatcacttaggctgagcacagctgctacatcccagggtaatttggtttcttatgtagaaaaactgcggtctgacatttaacatttcctcctctggagagtgtttttttctttttttgtctctgtgaacttattacccagcatgtcttcacgcctttacattcagcgtgttcacgtgctcagcgcggtgttcatgcccgcaccattgtgtgatcaccatcactgggtgaagggctgtgggcttacaaagcagactgggaatcacaatgacaaaccttgggttcagactccgggtaggacagaaggaagtttctacctgagtttcatgctaatcaagtaggggtgcaggcgatcaagcaggggtgcaggggtgcacctgcgatctcagggcatggcctcgttgctgtcactactgcggttgttattttggctgtctcaggcctcacctggagcaaaccctaattctaacacactctgtgttctttcagatatcactcccctcttcttttcccgtctttccagaatgcgctgtgcttgtgtcctctttgccaatcagagtgagccgcttggggactttagtccatgcacatgtcgtgtcagtgcagatgatagaaccttgagggtggtgacttccccacccggagccatgggtcgtgattcctttgtcaggcgttctgattggttcctggcttccctctgcggtggtcgtataccttgtgtgtggttctgggagctcatgaacaacaggaatcaaggacactgacctttcgccatcagcaaactcctgctgtgtagattcaggggcgaagagagtctcgcggtgagaaatactctgggtgagaatgaccctctgtgtctccttggtccttcacaccccatcaagcacaggcggatcaggagatgtaaaggtcagggagctggtaagcatcgacgaacaaaatcttcctgaggaagggccgggtgcggtggctcatgccggtaatcccagcacgttgggaggccaaggtgggcagatcacgaggtcaagagatcaagaccatcctggccaagatggtgaaaccccgtctctactaaaaaaaaaaaaaaaaaaaaaaaattagccgggtgtggttgtgggcgcctgtagtcccagctactcaggaggctgaggcaggagaatcacttgaaccagggaggcggaggttgcagtgagccgagatcgcaccactgcgctccagtcttgcgacagagcaagactccatctcaaaaaaaaaaaaaaattttcctgaggaagaagtagcatccccgagctggcatgttgggagtatccttcaatttcagatgcttaaattctcctctctgacaatggctaattaagatttggccacattatctttatttctcttcttttgaaattagtgaggggacctgaccttgggtgatccgcccacctcagcctcccaaagtgctgggattacaggcgtgagccacggtgctccaccacctacgtgtcttcttgtattcctcttcatgggagaagtagggaaaaaatgatttggtatatattcctgaaagataagagtgttctaagtatcgaatccttacacttaaaactttaggttgaaaatgttgcccaagtgccaataaaaattgggaccttaaacatagaagttcaccttgtgggtgggcccatcgctgctcccgtgagactatctctgatccaggatggatcagagctaggtgatacagatgtctctgaagcccacgagctaggcagcacgacagactggatgcttcttttggtgccagctgatccagaggacatggccctagtccatctcctagggccactgccattctttttgtgtccatatcaggaaagcatggtataattcgaggcatctatggctctgaagacttcttttctctctctctctctttttgagacggagtctcgctctgttgtccaggctggagtgcagtggtgtgatctcagctcactgcaacctctgcctcccaggctcaagagattctcttgcctcagtctcctgagtagctgggattagaggcatgcaccaccaacccagctaatttttgcatttttagtagaaacagggtttcaccatgttgggcaggctggtctcggactcctgacctcaggtaatccacccacctcagcctcccaaagtgctggggttacaggcatgagccatcacgcccggcctccttttctcttttcttcctatttatgactaccctcccttaaagcagtatcttctttatttcagcacttacagaaagctatggctgttgaccattcctttttgaagttgtgagttgtactaaaatatttatgtataatgtgtggataagcacttgatttactgaggccttttgatgataagaactcacaaagggttttagatcaagggtggcttcattgaagaaacacctctgacatcagccagcaaccgcattttcattaaagactctcaatctcagcctttccctggacgagagaggaatgggttgttggctacttcctggctgtctgtggcggtcgtattgatgttgggcccagctgtgctgaatggctctgttggtgctcgctgggcttgctttggctggcacagctgtgagtggaggacagctgtgaggagcgggagttggtgctgattgatgtcttgtgaaccccggcggagcactgagctccatgtatgtacggattggtcctgtgagtcactacagactgggctagaggtggcagcagaggcatgtggcgttaggtagtacaggaaccaagaaggccctctggactgtgaactctcagagaacgggtgttgttctcatgcaccctcagacccccagcctggggcaacactgggcgtgcaggaaaccaaagtctccgcttgttaaatgtcagcagctgagccacaaatggcaataagctgaataaagaaggtggtgcttcaagggagaggagtaaaaacaaggaagaaaagagaagaggggccctcagagccagggatggctcatgcggtttctggagagtggttgtgtccctaggtcagagtcaaatccagactccaagggctagcgttggaaataaactgtgatgtgcagacatgacttctcaccctctctctctctctttttttttttttttttttttttgagatggagtcttgctctgttgccaggctggagtgcagtggtgtgatcttggctcacctctgcctcccgtgttcaagtcattctcctgcctcagcctgctgaattgctgggactacaggcgcccgccaccacgcccagctaatttttttgtattttagtacagatggtgtttcaccatgttggccaggatggtctcgatctcctgaccttgtgatccgcctgcctcggcctcccaaagtgctgggattacaggcatgagccaccgcgcccggctgaaatgacttctcttagagctgcctcctttctgtggcacctcttccatatgattgggttagtaaaaatattctaaataagcaattgatttgaggctttttgaagccaaacagtttggtgccttgagagcataagccattgcttatgtgaaaaaaaacaagaaactgtatctttgcatatactggggcccaaataaatcccgtttgaatgaatgaacatttcctagtgaaaacatggggctggaacccttctgtgtccgtgggaaaataggaatctattgatggatatggctctttggcttaaagtgaaaaatcatgaactggtggtcaagaaatctaggcatagtccacgcttttaaccctctgggacctgtttttctgtaaactgaggtgacgctctgttctggaacagcccctaaggggccgtttcaggtcctgctacacgctctgagttgtgattagagactctctggccctgtcatcgaggaggacgcctcgagacaggcctcatatggtttgcatcacttcctcaaccagactcgctcaacctgaacctcccattgcttcccatcattgtgtctggctgtcttgagtgtctccctcctgagccaccccttgctgctgcagtgtaaagaggcctcttgatttattaatcaattaatcagtgcgtgctgaggagctgttcggggtagttaaacagggaaaacaaacagctggagcctgcaatcaagatggatcctaattaagaaccaccccccaaatgctgatcttcctgccccgtcactgcctcacaactcccccccaccagcctacagctcagcaaaccgccttcagctctgatggggcttctaccccatgcaagctgacagtgaatttccgaagggcagattttctccctaatgtcctagaggtaaataagccttgagatgagcgttatcaattacctgcaacgactgttgagcccccaaatggcgtagtagccctgttcatataggcacagcccacactctcctatcccagttcccccacgaacggagtcatggagctggaaggtccttacgataaggagaggccatggcgctgtggacagacgagaggttcagtgaggttcagtgagttgtctgaggtcactgcagaactccaaggtcacaagtggcagaactggaaactatctgatactcaacgaacactcctggtgcttgtttctctgtgtaatcctaaagcaaagtaaataagagacattgttctcactgaatccattaaatgcttctgttccagtggtacttagcacacaatgctgagaaggccaagattttcttagaacagaacctctgttcgaggttgcaagttgcacctccatctgcaactaactttctgtggtaacagggggccaagggacctcagtgcagtggtccagaattgcactcaccccatatcatgcctggacaaatgtttgttccttctgattgaacaccttgggagagcccagggatggctataattcttcagtggatgtaagaataagaatgttcttgccaggcatggtggctcacgcctgtaatcccagcactttgggaggccgaggcgggtggatcacgaggtcaggagattgagaccatcctgtctaacacagtgaaaccccatctctactaaaagtacaaaaaattagctgggcgtggtggtgggcgcctgtagtcccagctatttgggaggctgaggcaggagaatcacttgaatccagaggtggaggttgcagtgagccgagatcgtgccattgcgctccagcctgggtgacaaggcgagactccatctcaaaaaaaaaaagaaaaaaaaaaatattcttgaccagcctggcgaagaagatacttagaagtcttatttatttttttaacttctttttgaaagttttcactataaaattcttacatttgtctaatgtgtttatcaaaaatagaggcttttctgccagtgtgtcttctcatttctgtggaatgccaatcaaactatccaactctttgagtacgtctcgggtttgactggtaagccaggtatctgacttgcactagcagccttggagttatagaatctcctctccctctgcttctgtgttctgtaggaccctgctttctcggctgtgattcacgacaaactccaggtccccaacaccatccggaaggcatggaacgaccgggacaaccgctgtgacatttgcgccactcacctgaaccagttgaagcaggaggccatccagatggtgctgacgttggagcaggcagccggcagtgagcactacgacgcctcgccctgctccccgccaccgctctccaacatccccaccctggtggggtcccggcacgtgggtgggctccagcagcccagagactgggcctttgtgcccgccccctgtgccacctccaactacacaggcttcgccaacaagcacggcagcaaacccagcagccttggggtcagcaatggggcggaaaagaagagcgggtccccaacccaccaggccaaggtcagcctccagatggccaccagtccaagcaatgggaacatcctcaattcggtggccatccaggctcaccagtacctggatggcacctggtccctgtcgagaaccaacggggtcaccctgtacccataccaggtaagtagcctgtgtgagccaggaagagcagggctggctggagtcaaagcggagaagtaggcagcacttccttccgctgcctcctcccgggaaccctgtaactcagagcccagtgtttccatgtggcccccacagagttctcatcaaggtgccccacccgggcctgcctgctttgagagggtgttgctacatcttccaaactttccacacctgccctttctctgctcttcagtgtctccttcctgagagaccctctttgtgtaagaggtccttgctggtccaggtgatgccagcgacttcccagccagcagatttaccacatggcagagccatgaagaggtaggccacacagatacttggactggggtccaagccccgacttgtccacttattagcagcgtgacttggcacaaggggtttgccctgtcttaggctcaagtccctcatttataaatggatgtgagtcacgagaattaaataaggtagtgtttgcatgacatgtaggccaacacctgccatatagtaggggatcattgttgtgcctgttaacagagattttagatattaagtgagagtgagatgagtgagatgcttttgaaccaaaggatattgtgagtcccaggaatcacggttttaaagcagcctgtggaagtgctggacattgctgagaataaaatatacgaaggaacagtgatccgtgttggcactctgccttccctgtctataccttccaaaagaggtgtagatgcccttcttaacctctcctcccttgacagacccaaattcttttctatttgcaactcaccttaagaactactgggattgggctgccaaaactgtttcttccttttcagttatttaaattagaacatgcccccaagtttctccatagaaataaaacacaggtcttaaatctcccagggaatctttaaagatgttctaattttgcccgggtgagttttctgttggatgaggactggatttttaatgtaagtggcctccatatcccctgcatcaggggtgtgggaagcagcagagagcattgaccgtcactggaatggagaggcggccacggtcaagggtgtattactcagagaagatagttggtacatacagcaaatgatcctggagacctcaggctttttctcacttgggtctgtcatggtgggtgtttggtaggtggccttctgctgcgatgtgaggactcagactagagacctcaggttatttctcacttgggtctgtcatagggggtgtttggtaggtggccttccgctgtgatgtgaggactcagacttcttccaccaaatgcgtcaccatcttccaggggcctcaagagtccttcaccagaccttctgtaaccagccaggaaatgagggaagatagagtgtgtggaggatctcacaggaggatttggggcccagctttgcatggaagtgatgtatgttgcttacatctatattccagtgacaagaatccagtctttgctgggcgtggtggctcacacttgtaatcccagcactgtgggaggccgaggtgggtggattgcttgagtacaggagttgaagaccagcctgggcatcctggcgaaaacccgtctctattaaaaaaaatacaaaaattagccaagtatggtggcatgcgcctgtagtgtcagctacttgggaggctgaaacgggaagatcgcctgagcccaggaggcggaggctgcagtgagccgagattgcaccactgcactccagcagcactgcactccagcctggtgacagagcaagactctgaattgggaaaaaagaagagtgagagagagagagagagagagagagagagacagacagacagacagacagtttagtctcttgatctcaccttcccactggtgaagctggggaagccaatctacccgtgagcccaggagaaaaaggaacaagtcgagtgaacacatagcatagttttgttacgccggacaagatacagggaaacgtggagtgagttaaatgtggttgataaaatgccgggtgactttctctagagcgtttgagagtgttcatgtctcttgctatcttgaaagaaagtgggaaacgttgatcattatcctaagatattagcattcttggacggtcgaaattttcacttaactgggtgctttctaatttacaaaatctaacatatggattatttcctttaaccccacagtaggcctatgaggtaggtggggcaggtgttagatcttccttttacagttaaggaatatgatgcttagagaaatggactgattgtggccacacagccagtggcagaaccagcaccagctctccccttgcccagggaatggctttgcctaccgcggtttcttccaactttcctaggctaccccaaagtaagctgccgacatcttttccagatatggttccttttcagacctggtgtcacaaagaaaagaactcgttttacctgcaggggcctcactgcccctagacttttggatagaatcttctgggatgtgtatataaatataatgaggaaccagtggcgtcctgtgcagtgcttcacattctaaccttggaagtaaccttctagggcaggaacagagaagggcttctttgcatcatgggataatttgcttttttttgtttgcagttttaaaatataccatttagaaaattatcaaaagtaacatatttgttgtaaaataaaatttaaaatacatgaggaagtttaaatgagactttaaaagtcgatgtcacccggatataaactatgtaacatttggggatacttcctcctagcatttcatacactcgcaatttgtaaaattgtgaccaggttcaattctgtgacctgcagttcacttaatacattgggtacatttccccatgccactatatgtttccctaaaatattatctttagcagtaacatatttcattatatgaatattttccacgctatggagatgtcctcatttattaggttggtgcaaaagtcattgcggtttttgtcattactttcaatggcaaaaaccgcaatgacttttgcacccacctaatatataaccaaacatcaattaattagaatttaggtctttgctactataaatacaatgctcaggtgaacatccttttacccaggccatagtttcaacacatgcctggcttgtgtgagccacatacttgtgttacacagacaactcacatttcaccttccaggactccgaagctcttgtcacacgtggcaggggccggttagaagactcggcggctgcgccagcgctgatgagcgaggacagaggagcatgaaactggtgctttcctgtaaaatattcaaagtgaggtgaaagtttgtgtgtaagtcggaaacactgaagatgctgcttaaacggccgattagggattatttgtgcgtttcttttatttgtgcaatgattctgttcttcctcttacttcccaaactcagatgaaagagaatttactgtacaagtatttattaatctctaaccaagtaccaggcactgtgctaggtggtgggtggggccgcagccttgggctggaaaccctggttcctgtcctgaggtccttgcagtgggacagaaggcaggtgagtgcagaggtgaagagatgccgcggtgctttgggggcatgcagacaggctcctaatcccgcccgatgtggcaaagccagatacaaccaagattcacacaagccaccaacttgtggtcatcctgggtatgttctgttgcttctttccaactccagaacagaccaattcatgcatttcccctcagtaatgaagggaccagaggaaatctctctgggataaagagatttggtgcctggctatgaatctgcgtcccctgtgttgtgactgtgtcgtcctgatgccctggggtgggggctctgggtctggccagactgagtgtctcctgttgcggacatctccctgcagtacatattgtacagttcgcagtctagccagctcgtcagagacggttgactgctctgaaagctgacctcatttttcctgcttacccatactcccacttccctccccacagagcagatggcctctggatcagtgccagagccattccccgggcagagaagcatctagaccttgtcactaccaagggtgcggctccacacccgcgggacccgagcctctagaaatgagggagaagacgactctgcctttctgcaatttagacgtcgcaaggatgaaaacgatgcggacaggctttccagcagtgagcctggggaaatctgcgtcacatgggcgacagaaggtccctcgaatccctcaatccccgtggcccgcaccactgtgtaataatctccaaaggttgcagtaggaagattcttgattctcgtttgctatatccttcacatttctaaagtacctccagaaagaccaggaacctgtaagcatcacagataaataggaatcgatccagagagattttaaaaagagtaatttaggaagtactaagatgacatcaaaaatgttgaacaaaccacaaagataattctcattaaatatcttagaaaattgatttaataggagattataagacgggctttcaaagaaagactttcttctgttcatctgcagacatttagcacaatctatacacacacagagaaagcagaaaattctctagcgcaggggtccccagaccccaggccacagattgataccactctgtggcctgttaaggagccagccgcagagcaggaggtgactggcgggtgggtgggcattacctcctgagctccatcccctgtcagagcagcagtgccattaggttctcctaggagcagaaaccctactgtgaactgtgcatgtgagggatctaggttgcatgctccttatgagaatctaatgcctgatgatctgaggtggagcagtttcatcccatctccgcgccctatttgtctgccatgaagctggtccctggtgccaaaaaggttgggaatcactgctctagaatcttcatcttttttcttccaacttttatttctggtttgggggtacacgtgcaggtttgttatgtgggtaaattgtgtgtcactggggtttgatgtacaaatgattttgtcacccaggtagtgagcatagtacccaaaaggtggttttccgatcctcaccctcctcccaccctccacccccaagtaggcccagtgtctattgttcctcgtctttgtagccatgtgttacagccttcatttgaccacatgaaattgtgactttgaaaggatgtgtctagattagttccttgtaatcaactacagattagttacctctttttgaatggcagctgcttttgcctgattaacatttattatagtcaataactgcaggaaagactgtacacataacacacggagttataggatgttggtgatgttggtgttggaatgcacctgtgtaggatggtaactgtcttttgcatcatggtaggagatttggagacagagtcttacctagttcaagcctgtggtcccaccaactattaaaccagtttagtagcttgacatcttagtctatttcctcacctatgaaattcctacctcatggggtgattatagggaacaattaagaagaaggcgtgaaaatattttatgaactataaagcaggaataccggtataaattatctatttcaaccttttcatttaccagaggagaaacctgaggctgagagatttgaagcttcttttgttcagagttttctaaatcctagtttgatctcttttgctaaatcacacactcttggacaacagggactcattttattctcacatccctcacagcagctaacgtgaaaatgttgttctttattagagacagctcctatctcagggatgcactacaattactttccatgactggccctagtttaggaaagaattccaggccaaagacctatctagaacccaaggatttaggtggaaaccaccaggtatttgattccaagctaatctttaacctgaagtgtcttaatcatacttaataaatccttagatgcagtggaaagaacctcgctggcatttcgatgccacactcaatacaggggcatttgaaaggatagaagagctttatttcataggatttcactcgattgaacttgtcaagaaaattcagaagatgttagcttaatctacaagtaataaatccatagtggaccgttgatgcaatgaaggtcgtccatgtgcattccttgagttgcaggaaaatgctcttgatacaatttttcctgctttctctaaaaacatgcattggaatgaatgtgagaggtaatgctggactgaacactggccgaagtcattatgaggtagtctctattacagctttagaaatgattgcgcctatgaagcacagccattactggactttacattttaagatatgagcacagtctgggcacggtggctcatgcctgtaatttcagcactttgggaggccaaggtgagaactgcttgaggccaggagttagagaccagcctaggcaacagagtaaaaccccttctctacacagaaataaaaaatcagccaggcgtggtggcatgcctgtagtcccagctactcaggagggtgaggcgagagggttccttgagcccaggagttccaggctgcaggaagatgtgattgtaccactgcctgtaacctgggtgacagagacccgagaacctatctcaaaaaaaaaaaaaaaaaaaaaaaaaaaaaaaaaaaatatatatatatatatatatatatatatatatatatatatatatgggcacaaaaggatgtaaaagcaacaccaacctcaacatatatcaaggtttgctaaatgacaggacctctgcggtgcataacacttgctcctccgagatcagaagccctgggggatcttggtgctagaggacttccaagcgcccctgcaggaggaaggtgaggctctgggaggcccaccaagtgctgttgtactcagaggctttgccgattgtggcttcgtggaaagcagaagcgtgtgttctagtatggctgatgtcgggagatgaggtatacacgtgctcttcccggccgaaccacttttcaagaaggaacaggggtgggtgtttccagcaggtcaggagtataggattttcatccacgttcttcgcagctcttgagggctcatccagccacttgtgccctgaaatatgcagcacaccccttcttgggccagcactggggtcacctgcttcccacttgctgctgtgtctacccagtcaggcaatagtgtaagatgccacgattagaccaattatgacgtggaagagattcttaagaccatgggttttgttttctcctgtttataggcggtcaaagggatattaggttatgtatctttatgctttttgacaaattatgaacatggaaaaaagaatcaatttgtatattcggtcatggacacacatttctcaaggctagagtgttcagggtgaaattccaaaagggtagtcacagcttatgaatatggatggggccgtggtctgaagggaacacccagacttcactaggaaacttcaaaaatacgttcaatctgggcgtttgcttggtgtggtagactgaataggggccccccaacgatgcccacaccctaatccccgcaatctgtggatgtgttaccttacatggtaaaagggcctcagcagatgtgattaagccaaggatcttgagatgggggatcatttaatttaattttattattattttttgagacggcgtctcactctgccacccaggctggagtgcaatggtgcgagcttggctcactgcaacctccacctcccaggttcaagcgattctcctgcctcaacctcgggattacaggcatggaccaccatgtccggctaatttttgtatttttagtagagatgaggtttcaccatgttgtccaggctggtctcaaactcctgacctcaggtgatctgcctgcctcagcctcccaaagtgctgggattacaggtatgaaccaccacatccggccaaggagatcattttagactatctgggtggactcaatgtaattacaaggatccttaaagaggaaggcaggaggatcagaaccagagagaggaggtggaaggacagaagcagaggtcagagaggagagagatacaaatctgttggctttgatgatggaagaaggaacctctagaagctgaggacggcaagggtgtgattctcccctagagcctccagaagaagccagccctgcagggccatttttgagttctggtctccagaactttaagagggtaagtttttgttgtttgaagctgctaaatgtgtgctattttgcttcagcagcaataggaagctattacaactggtgagccttctgttaactgaaaagcttggtaaggagaagcgggatggggtctacagaccaaggagtccctgcagaaacctgcaggacagcaagaacgtgggcttttcatctcacacaacaaaccccgttaccctgcggatcggccggtccatgcacaagtcagattctttcatctgggtgccaccacagaatgagaggttactcatactgcaccgctggtttgcgattgtctcagatttccctattgttatagaatcataataagtagcacaccacagcgactctccattggtagctagtcattacaattatgtaagtctcatactgttgaaactgcagaaatcattccaagctgggggtgggagggatggaaggaacgggaggggaaggagagacttcactgaatttcatgtagaaggaagttcatctttgctagaggccttttgatctgatagaaggagatctcacagaactgccccagcaataattcttacctcatctggtaaagatcttcataatgcatgcacttgaatgcactttggacgttgtagagcagcatgtgagtgtttgctggtatcacgttttatctggtaggcaggacacagtcaatggggattccggagcaggggaatgggaagatttctttgcctgaaagcaggaattctcaattttggcttcacactagaattacttgggagattaaaaaaaaaaatcctaatgcctaagccacaccccaggcgaattaaatgagaatatctgcaggtgggacccaggccttggtttgaacttggccaagtccaagaaccacagtgttaaggaagaatttatctggcactggcgtaataggtacagggaagagaacaatgaatgtgtgtggatagatgagtgataggctgagagacaggtgtttgtttcttatggctgccatcacaatttactactaactatgtggctttattttttattttttatttatttttttttgagactgagtcttgctctatcacccaggctggagtgcagcggcacaatcttggctcactccaacctccgcctcctaggttgaagtgattctcctgcctcagcctcctgagtagctgggattacaggtgcccaccaccacacccagctaatttttgtacttttagtagagacagggtttcaccatgttggccaggatggtctcgaactcctgacctcaggtgatctgcctgcctcagcctcccaaagtgctgggattacaggcgtgagccactgtgcctggctcactgcaacctctgcctcctgggttcaagtgatgctcatgcctcagcctcctgagtagctgagattacaggcacgcatcaccacgcctggctaatttttgtacttttagtagagacagggtttcaccatgttggtcaggctggtcttgaactcctgacctcaggtgacccacccgcctcagcctcccaaagtgctggaattacaggcgtgagccaccgcccccagcctgtggctttaaaagcaacaaaaatgtattctcatagttctggagactgcaagtctgaaatcaaggtgtcggccgtgctgtgcttcctctgaaggccccagggaagagtccttcctcgcccttctgttggctccaggtattccttggcttctgatgcatccctccaatctctgccttgggtctcgctgtgtcctcttcttttctataaggacaaaagccattgggtttagagtctaccccaatccagtaggatctcatctcaatccttaactactatatgggtgcaaaagcaattgtgggttttgccattaaaaatcatagcaatttctgcaattacttttgcacctatctaataattacatcttcaaagaccctatttccaaataaggtcacattctaaatagatagacagacagacagacagataactagctagctagataagatagataaataaaaagaagaaaagtgaagttgcagaggtaaaaggtacatgcgggctctttccttgctgaaccacttctgaagaaggagcaggtgcagcatccacggctggtcagcagtggaggattctcattcatgttctttgcttggaggaaaaaaaaggaacaagtggaaaagatgaaaacgggccaagtcgagagagggagggacgtgtcatacctgcatgcatccttatactggaggggagcctctcaagagccagacaaaatgaaaaaatgctcagggacaaagtcaacgatcaacctgtatgcgtgggtttttcatagaataacagcctcctcttctgaacttacagaataccttgtaagtcatttgtgctttcacagccacagacataaatgtaaacagcacctcttgggccaccacctgagagtagataaatttaagttgcgagcctaatcagactgctgctgggggagccttgttccttctctaccgatcaagctgataatttggtctgtattttttgtttttatctttagtaacatttctaggctctaaaaggaggctagaaacagcaggtaagatgctgtgtgccttcaaggggaatttcttagttactagtaatagttacttaccatccctccccctttttgatgtgggtgagaggggttaggtggggaggtggggggtggtgggaatgtggctattatcacccaagcaagggaggagttattttcccctcccaggcaaagcttgggttgggggcagagctgagcatccctgcacagggggtgaaacaggtgggagagaagattgcctagatgtagatgcttttcacagtcgtcttgtgtgttagaggtctgcccacatcctgtctcactcagccaccctccccagaccttgttccctcaggctgaattttcactttcctatgggttgaagaaaagagccagggagtatgcaggctccatggtgagcaggccaagggggaaacaacagctactgctttttttcattttaatgacaaagaaaacagatcgttttagaaagtctgaggctgatactcatcaatgattttatccaaatctcacacaatgagaggttggggtcatgctggatttgctgctcatgcaccagaaataaaacaccaggttccttgctgactgtgtgacctcaagcgggcttcttaactgctatgtgcctgaatttcctcctctgcagagtggaaacttccagagctgttgttgggatcatgtgagagggcgtgttttgcatacttagtgctgtgtgtgacacatggcgacttctccgtgaagttgactgaaccttgagcgccattttcttttactcaactcaagttcatgtgactcaagttaaatggaatcaggaccctcttttccattgtaagagccagtggcagatgaaaagacatcaatcaccaatttcataaagtgaatatcaagcacataaaataaatgttatcctgcaaatctgaaaacattccctccttgacatattgccaaaaaatcaactttccatatgtacatcacatctcgtgtgagaatgtcatattttaagtagatgtgatctcattttatcattagtgaattaataaaatactgaaaggctcattgaccagttttcccccatatttggggatctttctaagggaggagggaaagcagcaaatagattcgaatcatttaaaattttacagcgtagtggacaggtcacatttaaaataacccaaacaagtcaaacgttattattttggaattcatttgaaatatcaagcaattcaggcctagtttatgatttttttttttttttggtttgtgattcttaccgaactctttgaaacacaggactcagccctttcattcttggtttccttatctatatgcttatggtatattattaatatgtttgctttcctattcttttatgtatttataaaatataaacctttcttttaaaattattatataatttgcaagtttcgataaattggaaaattgaaatgtcctcggctggtcgcggtggctcatgcctgtaatcccagcactttgggaggccgagacaggtggaccacctgaggtcaggagttcaagaccagcctggctaagatgctgaaaccccgtctctactaaaatcacaaaaattagccaggcatggtggcatgtgcctgtaatcccagctcctcaggaggctgaggcaggagaatcgcttgaacccgggcggcagaggttgcagtgggccgagattgtgccattgcactccagcctgggcgacagagcaagactccgtctcaaaaaaaaaaaaaaaaagtcctcacctaccccaccccagacatacacctaattcatttctaattgagattttactgtgctaacagtctttagtgtgatgaattagcatgcctttatcttatagaggtatttgtgaggattagttaatgagtcatatatttcatatgcttaagtcactccgagggagtcatttaggtgtttagaagcatattagtcactaattttgggactctggagacttagtccatttctgcagcaccactggccccgaggagttaacatatccctccattgctcatctgagagcctgggcaatgacttgagacactggggagaaaaaaagattccatatgaaaagcaaagacagcagcagccatgtctatattcaaggctgtggctgggagttgtctaattagatgactcatctgagccagcctgatggtttccatcaccttcactaggctgctccccaccgtccattaggctgcaaggcgctgcgtcgccagggaggttgaccccacctgcttgttcatgacgtgctcccttttggttcaagcaacagacatggttggaagcaagactagaaggcagccctcaagaattacaaatgacaaaactgaggcccaggcctgtcaggcgacctgtgccaggtcacacggctaggaagtgacagcgatgggagtcaaacacaggtctcccatgcatttacccctgcccctgccccagcccctctctggagggaaggggaccgattcctcagataggtcagatttgcaggcctcctggggagggttacccaccgcacacactcctgacgtgatttctttgggggcaatttggggtgcctaggatttccaagccaggtttctcatcttattcctctgcatagcagtttagaactcaatgcgctgtattgtatctcctccctgggaggtggggaggttggtggggttaaaaccgaaagacactgatgggccaaaaagatgaaaaaaaaaaaaaaaaaaaaggctgtgtgggcaatgctgccatctagtgagacatactttagccaacctaagaagctgagtggtcctggtagaatcccaccgtaaagtatttcgatgtcctaagcttcatcaaaggagacagggccatctccctgtcagtagcgtggtctttaacacagtagtgaagggttaaattcagtgtcctaacatctgtccttcagaaaggacccgtggcctgaacagatcttctgtgagaatggagcttggttttggcctggtagaaagaccacacagatctgcatgtgagtgctggctcacctgcttagtagctgaggaatgtttgttgttgttgttttaattgtggtaaaatatgcctcatacaaaaaatgtgtcatctgaatcatttttaagtgtacagttcatcaagcttgtccaacccgcagcctgcagtctacatgaggcccaggatggctttgaacgcagcccaacacgagttcgtaaattttcttaaaacattgcgagatttttttggtgttttctttttgttttttaactcatcagctatcattagtgtcagtgttttttaagtgtggcctaagacagttcttcttcttccaatgtggcccagggaagccgaaagattggacacccctgactcttccatggcattaggtacattgacatgatgtgcagccatcaccaccatccatccacctccagaatactctgcatctccccaaactgcaactccacaccctttcaacactcactgcccattctccctcccaccagcccctggcaaacaccattccactttgtttccgtgaatctgactgctctatgtacctcatataagtgggatcacacagaacttcttctctggttaatggtctgttgcacttggcataatgtcctcaagtttcatccgtattgtgtcatatgtcagaatttccttccttttaagggctgagtagtatgctgctgtatgtatataccacattttgtttatccattaatgtatcaacattgagttgcttccatctcttggttcttgtgaataattctgctgtgaacatgggtatacacatgtttctttgaaaccttgctctcaattcttttggatatatccagaagtagaacggctgggtcaaatggtggttctgtttttaatttgttggggagccaccatactgttttccatagtagcggccccattttacactcccacaagagtgcatacgggttccaatttctccataccctccccagtacctttttcctcttcacagtagccatcctaatgggtgtgaggtggcatctcattgtggtgtggatctgcgtttccctcatcatgagtgatgttgagcatcttttcatgtctcttggccattggtaagctgagtaatatttggtaaattacttgaccactcaaagcctcaatttcctcttccatagaatggggatagtatctatcccctagtatagcatctatggcctaagattgctgtgaagattaagttcattattctaaaagaaataaattgtttttggttctgtacactgttctaagcacaggtttgtgtgtgtgtgtgtgtgtgttttgtttcttgttttgttttgttttgtttttgaggcagagtttcattcttgttgcccaggctgcagtgcaatggcacaatctcagctcatcacaatctccgcctcctgggttcaagcgattctcctgcctcagcctcccgagtagctgagattacaggcatgcaccaccacgcccggctaattttgtatttttagtacagacggggtttctccatgttggtcaggctggtcttgaactcccgacctcaggtgatccaccctcctcggcctcccaaagtgctgggattacaggtgtgagccaccactcctggctagcactggttttaaattatatatgtatattctatattgtatatatataaattatttttatgtgtgtcacaattttactaaatatatacttacatgtatttatatataaattatttttagtgaatatatattttatatatatacacacacacacatatatatatatgtatatgtatatatatatatacagagagagagagagagaggcaaactctgacctgagaagctctataaagtcaacccacacagattactcacagagcatggctctctgcttattgcagcccgaaggcaacacatttaaaggtgaggcagacatacctaaaataattaacatgcccctgaaaaacagcagtggaattggtgaatttagaaaaccgaggcatccctcacgtctgaacacggtatccctgaaaaatagcggtggaattggtgaatttagaaaaccgaggcatccctcacgtctgaacacggtatccgtgtgtttttagcagtaatctcatgatgaatatcctgaacacagccttcgtgcagggtccactctccagcttagagattcattcccagcctacttcaaaggcagctgagactgtgtattggagtttctgttcaagacaacggtgtcttgttttcctctaaagacagattgtactttctcatgtaaatagcctttttgatagaatgcaggtgcttccagggattaactgctgctattaggctaggtggcccactctctccaccctgttcaaacagccagtgcttcatcatagtttatgtaactggcaacttagaagcagcagcctctttgatgagtccattaggaggtaggagaaggattggtagcagagaaatgaaagttcttgcacacaaataatgagtagaaaggatgaacggtggttgctggtgctttctgaacaaaatgagggcaaggggtgctgtccactaataagtgtcatttagaggctttattcttctagaaaaagggctgcccatctgctctccactgagaaggtgatttgccgactgttcctgaacgtgtgcctgggttgctaaaacttgcggaacgtgtatcagctgttgaaatggcctttcctttgggaaaactgtgcagacagcaaagagagtacaaaacacgaaaatcttaattccattccctcttctgccactttcagtatgacctcgggcaggttttctacctgcacagagaaaaactgaagtcgcacgctgctcttggttttctcagcctggagcagatgcctttgagcagctaccacttcccgttcccctgacagtgtgctccggctttacgaggctgtttttctctccacagtcaccaagtccactgtctctccacagtcaccaagtccactgtctctctccactttgggggccatctgtgaatatcactaacttagcattacagtaccaaaaataataattatagctaccacttgtgtacttactatatgccaggcactgtgctgagggctttgtgtgtcttaatgcattcaagcttcataacattcctatgaagtaaattattcccattttaattagttagttaattaattcatcaagacaggatctctttctgttgcccagctggatactgtggtgtgatgacagctcatcgcagtctcaaactcctgggctcaagtggtcctcccactttgacctcccacagtgctggattacaagcatgaaccgccatgcctggcccattctcattttaaagataaggaaaatgaggtacaagttgatagaaacagacagtacctcaccacctgcatggaggaatcacgtatttatggagtcctgaacatttaatcaacaactgttttattgagcatttagtttgttattggttgaaattaagaagactggtaaataccatgaattaataaaaagttttatgttaatagtaaacttgtttaggaaatctggttttgtctgacttgaaatattaaggaaatatgtgtaggtttaggtaagaatatatatttggtttaggactgttcatattaagttacatagtcctcagccttaattcacctcacatctccccatacatcttatgtctttttctttcttctttttgctattaaattacagcatcacctcttgatcactctaagacctaatcatctagcttgtaaattattcatacttttccccctcacctcactcctctcttttggattttatccatttatctgcatctctgagaataggtgggcaacagaaataaaaggattcagtgaaaataagttcattctgtcatttattagcaacttacacaacaggtttggcagaaaagaaaatgggaactaaaatagagtaattaaaaagaaagtcacttatttaaacattgcatatcttgctacctcttctaagtagaaattaattagctcctaacagctaactaatagactaagtggaaaatagaccagtgcaacatttggggttaattggtacaaatatattgattacagtaactagtcattaaatgttttataaggtatatatgctattagtataatctctgtatggacatcatctactgagtgcatggatgccgtaaacacatcatgcttagaaccaggcgtttgaacgctgtctggagtacttttacattgtagtaccctgaatgtacatgcctgtttgttatcactgggagggcagctcaggacaggattataaagagatggaaagaggagcaaacctggggcggcgtggagctgtcatgagaatggtattttcgggagctggggaagaggcagagaaggaagggaaaacatttaaagagggcaaaacatggacttcatccgttagctctacagacacggcccttggtagttaggcgacgtgaagccacgtgtactcaggcaggtagtggggaaggctgcttctccaacagatggagacagggaggttggcagaccgctggcttaggaggaagacagcagcagaagggttgcgtgtgtgaaggcagggtcacagatatttagaacgaagcccaaagtccttggagattggttggatgtgggaaaagagagaggatggtgaggctgagactctggtttctgtgccaggtgttgcatggacggtgagctattaaccggtgcagagaaagccgaaagagtaaggctgagccatctgaggtcaggagttcaagaccaccctggccaacatggtgaaaccccatctctactaaaaatacaaaaattagccaggcatcgtggcacacacctgtaatcccagctactcaggaggctgaggcaggacaattgcttgaacctgggaggcgaaggttgcagtgagttgagattgtgccattgcactccagcctgggcaacagagcaagactgtgtctcaaaaaaaagaaagaaaaagaaaagtatcagtttagcaatattgaaatgtgcagcactcaattattagctgtattcagcctgctgtgtaattgatctaaaaaaaaaaagacagatttattcttcctatctaactgaggctttgtaccttttgagcccagtgactccggtgccttgatgggggccgggggctatgacccaggctttgctgagcgatgagggagcgtgctacttctggggtcagggctggagggctccagctgcccatctgggctgccactatggaggagagctagacattgaccacccaccatacaggatgtgtttgcctccccctcactcacaccctggttgtggcgtaggtaaacacagcaaggctcagagggctccaggaacctggctttaagattgccattagcatcatttcctccttaaacaacctcctatttacagctctccatcgataagatatgcaatgaacaacttcatcaggttaaactgcagcaaatgtcaccacttattttgtcactctctgatcttggggggagaaaaacagtgcagcataaaatattgaactgtttactcagtatttagttcattcagtgttttcggatgcccgctacgtgccagcggggagtaaagatgagacaggcttagtccttctcttgagggatctcaccaagtgcagtgtttggtgacgcaggtcacactggggacatgccatggcaggggcacagatatcagctgggggagcagagatgaaggccagatacgaattcccctgcgcatctgaaagaatgcttcatagctttgaattagatgaactgtttataggaacggtaatccagaaacaagtactaaatgttgtatggtagggtgtactagaggctgtattatctgacctaggtttttttttgttttttgttttttgttttttgttttttgagatggagtttcactcttgtcacccaagctggagtgcagtggcgtgatctctgctcgctgcaacctctgcctccccagttcaagcgattctcctgcctcagcctcccgagtagctgggactacagatgcccatcaccctacctggcaaatttttgtatttttattagagatgcggttttaccatgttggccaggctggtttcaaactctaagctcaggtgatccacctgccttggcctcccaaagtcctgggattacaggcattagccactatgcccggctccaatctaactcttgattcctcctttataactattcatcagactgagcaacttggcaagaacctgactatcaaaaacaaattagccaggcatggtggcacatgcctgtggtcccagtgctttgggaggctggggcgggaggatcgcttgagcctgcaggtctagactgcagtgagctatgatcacgccactgccctccagcctaaacaacagagtgagaccctatctcaaaaaaacccgcaacaaactaaaaaaaatccccgatatttctgcttccctaatatgcatgataccagcagcagacagggctgctttgacacctgcccaaagtgtagctggacatctatgtagactcatggagtttggggagaataggaaggcgtcaaggctaagtacaggtcccatctctctccctcatccacttcccccaacctctggtcattcaccaagaaacgttcacagtcctgggctgcgtttactaactttgttctcatgcgtgcttctatttttgaggccagaataggccattttgaaacctctggttccagccttccccttaggaaagtgagcggcagagttgcgacctctctccctggtggctcatctctgggagacgagcgctgtcctcagaagtgacgtggaagctatcgtgacagaggtgttttgggtcagaaactttccattagtatttggagaaaattgatctcattggagaaaggaccatgatatgaacaagtcaggttttttttttatcatagtattttttaaaaaacgttctaaggagaagatttacatgaccactttctttctgacggatacttcttcctggatggaaggaataggaaaagtacataaaatagctcacatggaaaatatttttcctttgatgaaaagtgaaactaaagtagcacttgcaggatgcacttttaattcctgaagcaaaagccgctacttgcaatgctaagtcacattgacgtcccagtcctgattgggccagatttcctctttctttctcatcttgtgttagcatttaaaactgccaagataatgactatgttaattaatctggcccaggatattttccccataaacaggagtgtgactgagtaggtccctcgttccttctacgtctgcctcccgccttccctagagagaagtgaatctaagtcatgctggaaaggtggtgcctaaactgtaccttaagggggaaagggctaacagcccttctcccatagccctttcagcactgtgatcaatctgacccttacactcaatttgtctacaattgtatctctattagcaatgctgctctgagtctgttgggtggaagacatccaattggtgggttgtttctgaacactggaccagcccaaggactatttcaaggaaagtcagggtgagatttgaactgtgcgcacctttgcctgaagccagtctcctgtaattgactctgggacagtaagcattgcagaagacagcagcgtccctgatgttggaaggaagtcaggcttgcagtaaaagcttatccagagaaagaatgtcattctctcaatctgtctctccctctctctctcttgccaggaaagttccgttttgttagctctagtgcttaatgatttcagggttcacactgtgtccactctcaaaaaagcccattttcttttttttgagacagagtttcactcttgtcacctgggctggagtgcgatggcatggcctcggctcactgcaacctctacctcctgggttcaagcaattctcctgcctcagcctcctgagtagctgggattacaggcatgcaccatcatgcccggctaattttgtatttttagtagagacagggtttcaccacattggccaggctggtcttgaactcctgacctcaggtgatccgcccacctcggcctcccaaagtgctaggattacaggcgtgagccaccactcctggccaaaaaaaaaaagcccattttccatgtacacacactcacatgtgcatgcaagtatacagtcttcctggcagaactggaatgagttaaattttgtccatttttattactagaattggctaatagggatccatagcttataatgcatcaacattaaaaatgaaattatattttgaggctcactgcatataaccatgtttaccctctgaaaagatattgtcctcccttgaatatttgacgcagtaaattatgttttggaggaatgcttaagttacctatgaagtatccatttttttaaatgttggttttttctattagtttttaaattaaatggtacatgcgcataatttaaagatctaagtcatttgataagacttgatatgagagacgccagcccaacactgtgaatgcagtgaggcctttcctcctttcccaaggctcattaatattcatctccctattttaacattcttaggttgctccttcttgatttacttagttaaagtttcctattacagcagttctcaaagtgtgctccacagaccatctgagtccctaagaccctttcactgggtttatgagatcgaaactattttcatgtaatactccgacgctatctgccttttttacggtgttgacatttgctctaatggcgcaaaggcaatgatggataaaactgctggcttctcagcatgaatcaaggtggtcacgccaagctatgctggtcatgctattactcattgtcatatatttggatatttggagggtttttttttttttaagaagtacagtgttacttgagtttattttattttattttttatttttgagacagagtctcactctgtcgccaggctggagtgcagtggtgcagtctcggctcactgcaacctccgcctcccgggttcaagtgattctcctgcctcatcctcctgagtagctgtgactacaggtgcccgccaccatgcctggctaatttctttgtatttttgtagacacggggtttcaccatgttggccaggatggtctcgtgatccactggcctcagcctcccaaagtgctaggattacaggtgtgagtcactgcgcccagcctacttgagtttatttgatgaggcagtgaaaataattttattgaatcaaaaaatgtatgttgacatgtgaagtacttgggtggcataggatggtcagttgcattagttgcaagctctactagcctttccccctctgccagtagaatacatttttacttgaaggaataacaaaccaacaaactatggttattgagaagtaggtattatgaagacattttctcaaaaggaatgaaagtttgccacttaaaggaaaataactaatggttattttcctttggtttgtttattaatcataaaattttggcctagcatgatggtacatgcctttagtccaaaccatttgggaggctgaggcaggaggatcactcaagtctggggaagttccagaccaacctgggcaatataacaagaccctgtctcaaaaaaaaaaaaaaaaaaaaaaaaaaaaaaaccaccataaaattttgagctttcaattaaaagataaaattttgaaaacttgattctactaccatgggcttgaaagctttccaatactaaaatatttttctggtaagatttgtggtgatattaacaaatgtgattttttgatactatattatggaatgggtcaacgtctggaagatacagataactcagtaaaccagtattttccaaatgacctttgcattatgttacaaaatcttgcaacataagatccatacaaagtacaaggtagcctaattgattttagtacaatgtgataccaaaagtttattaatatatttaatagtttcagattgctcatttcagtgaaattttaagaaactaccacttgttgatttttagtgtagtttctaagaacagtgtacacagttatctgaatactcctattcaaatactcctccatattccaactacttgtctttatgaggctgggttttctttagatatctcaacggaaaccacatatccagacataagccacataaccaaaataatataagcaactcattaaagagatttgtgggctggggatggtggctcacacctgtaatcccagcactttggcaggccaatttgggaggatcacttggggccaggggttcacggtcatgccttccaagatcatgccacggcactccagcctgagtgacaaagtaagaccctgactcaaaaaaaaaaaaaaaaaagagagagatttgtgaaaatgtaaaacagcaatgccacttttcttactaattttttgtttagaaaataattacatttcatacaatatttatgccaacatgtgatgggtttattattttaaaataaataaatgcatctatattttaaagttttcatttaatttctagtatggtgactatcaataggtatatagtgtatttacggttgctcttatgccagagcaaccagtccagactggagcagatcaggagaccctgggaaagaactcttcagaaagatggaatgattcttataactcctatgctggaacatttcgagagcagagttacagaacaagaaggagagttttggatggaattcccaataaatacatagaaaacaaagcaaattgaaaaaaaaaaaaagataaaaaaattgaaccatgaaggaagagctctctggggctctccgtaatgtttaagattatgaagagctcctgaaacgaaagagtttgagaatcaccggccttcggcgtaattacgaaacatgaaggggtagttctctttcgccaccacccaccccaatcctacgccacagaaatattcacttcttgtcttcccattgccctaacaatttgttatgatttgggttggatcaatattctatattatgatttatgtaaaggttatataaaaatattactctgagtacatagaggctgtttgcagctgagctgtgtaatgtggcttttcatttaaatgtacaaaagggatacattttttgataccttggatctgaaatatctctctaatttgccttaacacttgatggttggtttttggcttgatattagagttctaggttagatgtcattttcctcagaattgtgaaggcatttctctatggtcttagagcttctgatgttgctgttgaaaagtctgaatctggatcatttatgtaacacatctccctctcccttcccctttccctgcccgttcctctcctgaagcctgtctctttagtgttgagaaatgtcacagggatgtcttttggcgtggagctaatggcatcctttgtgctggcacttggcagtcctttcggtgtacaaattcatgttggcctgttctatgaaatattctttaattattttttaacactgtttttcctttcattttcttttttattgtttttgtaactcctattatttggtgttattgtctagtttaaaaattttggggggctgggtgcggtagctcatgcttgtaatcccagcacattgggaggtcatagtgggtggatcacctgaggtcaggagttcgggaccagcctggccaacatagtgaaaccccgcctctactaaagatacaaaaattagctgggcgtgatggcagatgcctgtaatcctagctactcgggaggctgaggcaggagaatctcttaaacccaggaggcagaggctgcagtgagccaagatcccgccactgcactccagcctgggcaacagagtgaaactctgtcttaaaagaaagaaaaaaaaaatttgtcttttctttcctatttgtcaaactttgtaaaaacttcatcttgtaaataattggttgagatgttcttttctgctgtaataattttaatttccaagagcttctctttgttgttactttgtctctgcatcttccttttttatggcattctgttcttgcttcatggatgcaatattttcattgatctctcagaatgtttgatacttggttttgtttcattctgtttcacttttattcttcctgtattgtttctccttccgcaaagatggcttctgttgttttgttttcttctcttttgtatcatatgttttcctcaaatatttggtgatccttggctgactgattgtaatttgggagtgagacgcagaataactcaaggaggagcatggaagggattggtgagtgtggtcttacctgtgtggtgacttgaagaagccattttcttccgtttctttaggtcttttcttttgagttgttgagatctcccaggaaagactcttctaatttccagcttgctgagtgtaaattttggctgccaggttttgggagctaagaggaagaagacaagggagatttcaaatttagtgtgtaaactttgactcagcccccttgtttttggtttcctgcttctaactgaacctagtgtgttctagcctagatgccctgggtgttattctctccaagaacaaacctttaatctctgccagatggggaggtacagtcacccagctacctgggggaggggaaggggtcagggattcgaactgcttcttaaacagaattgcaatcagtccccttggacttagctccaccgttgtcctcactgcctgcaatatctggggccaccaactcttgagccttttgggggttttgaggtctgaacggtgttgtttgcagctttgcctatcactagcttgagactcatctttggatctgctaagtcagttactgctcacctgtcttggctccagctgttaaaatcctgttgcagtttcttcctctcccattttctctgtcgtcgtgagtttctgccatcttaaaaattctttattgtcattttattagggtttcaggagagagcagtgctccatgcatgtatttaatccactaactttaaccagaagtatttttttaaacatttggaaagcaggctgcgtgccgtgactaatgcctgtaatcctagcattttaggaggccaaggcaggcagatcacctgaggtcaggagttcaagacaaacctggccaacatggtgaaatcccatctgtactaaaaatataaaaattaaccaggcgtggtggcacaggcctgtagtctcagttacttggaaggctgaggcaggagaattgcttgaaccagggaggcagaggttgcacagagccaagattgcaccactgcactccagcctgggcagcagagcaagactctgtctcaagaaataaaaaataaaaatataaaaatataaagcattaaaaagtaccttcaagtttttttctttctttttttttttttttttttgagatggagtttcactcttgttgcccgggctagagtgcaatggcacgatctcggctcaccgcagtctccacctcccaggttcaagtgagtctcctgcctcagcctcccgagtagctgatattacaggtgctcgccaccacgcctggctaattttttgtatttatagtagagatgggatttcaccatcttggccaggctggtttcgaactcctgacctcaggtgatcacaccctccttggcctcccaaagtgctaggattacaggactgagccatcacgcccagccaaggtgttttcttagtaggtgaaattactgagttagaagcatttattcaggacctactccttcttaaacaaagtcattgttttgtttcttcattcgcctatgtctgcaatattatagagctagttcaaaagtaagcagtttgattttggctccaacattgagcaatcataatgtaatactaggttcaaatgtgagtagatttgagtgcatgtcgatgttgaaaataaactcactattggagtgttttaggatgctctggctttccaggatggatattacttaggagtaggttggctctgggttttttcctgggttcttgatttgcttgatttggttcttatataatctattctttctttccctttccttctccagaaacagctcaaattatgaaataactttcaaaaacaagttaggtggtagtagtggaggtagtgaaggaaaacagggaactttcctgttcgctgcagagcaaaccaggtgccacgtagaccttctcagatgccactactggacgcagccctctagacctgaaggtatgctggatagacccggatagacccggcggggtgctgagcccaagcgtgtgccagggtgggaggatttacacttcagaaactggcagatgctatgaaatcagaaccttttttcctggcaagctggtatttaaatcttaaccagcatgcttctgtctagacctgactttactcttggggcaatctgatataccccccaaagtgtcataatcacgtcagcctacccgtatgacattgtatttattcactgcactgtgagctccagggagtccaggtgatagaataggcaaagggcaaaatttggagccagacagcctgacatttacatccttccttggctacttctagctctgtgacctttggcaaacctctgaaagcctcggcttcagtttcttaatctgtagaacagggggggaaatttcttcctagcgatggtgttgtaaaaaattcacaactgtggcagcctctgctctcccaaaaccatgtcctctagaaaatcctggctttatggagtaggttcctctgtggcctgtttctgtttggcagcaggcttgtgacgtctttgcttagggtccttatttttataacagaatactgactttttgtttatatggtttccaaaatttatgaagccactaatcaaaaacatgggatcagtgtacttcagactcttacaagggaatataatgttagacagacttctctccggtgctccaaatcccacaagaggaacagttttgttaaggggcagtcatttaaaggatgactcacaaattatctgtctattctaagttatacctttgaataaaattaaaataccaaataaaatatgtatgcattgggacaacatcaacataatcatttttataatcactcaaaactgtgtcttaatcatatggcttcaaacctttattgcaaattattataagaaatgctgtctctactaaaagtacaaaaattagccaggagtggtgacaggcgcctgtaatcccagctactcaggaggctgaggcaggagaatcgcttgaacccgggagacagaggttgcagtgagctgagatggcgccactgcattcctgggcaacgacaacagtgaaactccatctcaaaaaaaaaacaaaaaacaaaaaaaaaacaacaactatttgacttttgctttagcgtctgctatgaaccatgaatatagatgccaattatccattacatggttcagttttcctggcttacactgccctacacaagacatctgtccttgacacagggactaaccttgtctctcctaaggaattagtcatttttatcctcttagtaaggagttgtgaaatacatgatgtttccctatgcacctccgtgccaggaatgttagaatcaagttttgttatcaatcataagaactgtctaagattttcatttgacatgctacatttctactcctttttttttttttttggaaagggtttcactttgttgcccaggctggagtgcagtggcacaatcacagctcactgtagcctctaccaccctaggctcaagcaatcctcacaccacagcctcccgagtagctgggactataggcatgcgccaccacgcccagctaatttttgtattttttgtacagataggagttttgccacactgcccaggctggtagatttctcctcttgatcctgttttccacatgttcatttttttttttctttttttgagacagagtttcactcttattgcccaggctggggtgcaatggcatgatcccagtttaccgcatcctccacttcctgggttcaagcaattctcctgcctcagcctcccaagtagctgggattacaggcatgcaccaccacacccagctaatttttgtattattagtagaaatggtgtttcaccatgttggtcaggctggtatcgaactcccgacctcaggtgatccaccctcctccgcctcccaaagtgctgggattacaggcatgatccactgcgcctggcccacatgttcatttctagcttgttaactttattgtatttaccatactctcccactttttaaactacagattccttgtagaaaaatgaataaatgaatgaatgagtgaaggaaagtcagtggcaataactaatgatgtttttaaaattgtgtagtaagtggcatagttatgagatttgggggatttggggctggatcagacagagaaaacagaaggggaacatgccagtgtcttcaaatgtttgagacactgtagtttggaagagacagcggacatgatttttattgctcctgagaatagaataggagccaatgaatagactatccattaattgatttgttcatttctaagttatttcttatgcacctgctctctagggcatgtggacgaggtccagatgaggacaagtttcctgctctcaaatttcttgcattttagggaagtaatttttggctgacttgcaaagaactttctaatgagaagagttatataaccatgggatgtgttgccttgtgaagtagggagctttccatctttggagaatctcaaaaagggctgaatgaataccctgaaaaatactactccctcgggagagaaggtggatttgttgacctctagggtttggctctactgtgcttccatgtttctcttttatttgtcagtttccatcttaaactgaaggattaggtcatttcagggagttctggaggtgaggtggtgggaagcaataaaaataccttcacaaaccagttcctttactctttgatccaggtggttcccacaggtcccttgacccccgataaagtaatcccggctgcctgcgacggaggtgtaggcagccagggttcatggagcctgtggttatctccttacagagagccttatcagcttgtggagccaccgtaaagcttgctttgacctttggcagagactcctcctgtatgtctgtccacagaaatgagagcaggtgacagacacctgggatgatcctgagacccagcacccaaagcccaggcttctttctatggggaagtcaagcagagggacccaagctcatagccagtggaggggtgggttgatgagaggcgagccctttaccagatgtgagcccagtcatcactctgcattttctacgcaaaagtccaggggcttgctattgaaattaggcaaagaggacaaagaattgccctctgtaaagtcctcaaaaaattataaattataatttttataaaatgatagaattctaaaataaaatttttataaaattataaattttatatatatataatttcctggaaataacttacagaaaagttgcaagaataaaaatagtacaaaggacacccttattcactgtactccgttagcaattaactattttttctggaccatttgtgagtaagatgcgtataccattagcctttatcctgaagctcttcgatgcatatttcctgggaaatgagatatgctgtcacgtagccagagtacacttatcagcttcagtaaaattaacattgatgagtacccttatggaatctatcatgcatgttccaatttgttttcagttgacctgataatgtcctttacagcattgtctccctccagtgaggggtccagtctaggatcagattgcatttcgttgtcgtgtctctttttgagggtcttttaactgtaccattattattgttatctgtcatcttattagcttattcaaagttgttagaggtatttcttatttagggtacatctcatttacaatcatcctttcgttcacttgaaaatgaaggctaggttctctggagtccagactcactccccttctatgtgaagtgttttcctgtgtatggtggaagggatgggggtgagaaattttggatgtacattatgtacatggttgacttttctttgtttgatttaaatcatacaaaaacagatcagatcctttgagatcattttcaaattccgctgttgtcaatccgacttattgccaaggagatcgtcccttcatccttgaggaggaagaaaggatcattttgagaatcttcgtttcatatcaagacaacacactcttctgaatctagaaacagaaatacctttacatttacttacagcccttatctcagcactttcatgcatcttatgagaagcaacacgcatgataattaagcatttctatgcatgcagagctttggttagcttggtaaagggtatgttcagcaattctggtccctgccctccagaaaaacttgcttaagatgcaccaatatgcattattaaatataataacacatcaagtaaaaactatgcctaacactcgcaggctatcatacagacttagaattattgagatgatttttcagatggtaacatttaatcacagagaagctgaataatttgccgaagtttactttaaaaaaaatcagagctacgataccaatgttcagtacctttctttcttagtataatcccctactttcaaaataacctttatagatatttctagtatctacgctaagaaaaagagtaatggtgaaagactgagagaagacactgctttttaaaggctatagaaatctggtacatggcttctttgaagaaaaaaaattaaatggaaggaaaattggctgctcattttctgagggtgcaattttatatagaagatatttcactgtggtctgtatttaacaagctgcggggaccctaaggctggtagatggtcagactggtaacattttctaatgtgactctgataattttgacataggctttctttttggctgccctaagtatttatccttttcacctgatttactttacattcgcctattttaccatgggttacagacaagaacaaattggactcttaaaatggcatataattttaatattttctgagtttctagtattctaaattcataattataacctgagggatgtatgcccacagggcataaaacaatcacatagatagtgagttttttttttttttttttgaaattaccttggctacttgaggattctctacacccctgctatccagcatgggggccaccagccacatggggctactgagcattgagacgtggctagtctgaactgaatgtgactggtctgtataaaatacatattagagttcaaagacttggtacattaaaaagaatgtaaaatatctcattagtagacttttttatattgattacatgttgaaatgataatattttggatatgcagggttaaatgaaatgttattaaagttaatttcacctgtttctttttaattttttgatgtggctactagaaaaccccaaattccatatgtggtttgcatttgtggctcccattatatttctgttggaaagctcagctctagaaggaaagaaaatacataaaaaaagaccaaaaaaaacccaactcattcagtgtattttagagtgaattacggaagggaaagctgaatagccaatgatcccattttttttcttgattaggtttggagttcattaaagcttctttaattaaatatattgtaaatctgcttcaagttcccagttgagatgagaattgaatctttttgtttaattttaaaaattctaagaaaatcctgaactcacttcaaaagcgacttgttttttgaaatctttgtaaaaagctttccatttacatggattggaggtctgattaatatagagttttgaaggggctaaagaggtgtgaaaattatccagaaacttctgaaaggacctttcttatctcacaggcatccagggagacataagggcccttagaagccgcagatcagccataagcatctgtgttcacagtttccttccaataagcaaaaacactgggagagataacatatttattcctaggtgtctataactgaatttatgggtgtaacttgctggatattattgcccttgtaaacccatgtaactgcacacgtaaagcatgtttttattagttcctacataaaatttttatgataatggcaaacaaaggaccaatttagtttagctgagtttgttcttattactccagcttccaatagataagcaacagtgcaaacagcaggctgggcgcggtggctcacgcctgtaatcccagcagtttgggaggccgaggcgggcggattgcttgaggtcaggagttcgagaccagcctggccaacatggtgaaaccccatctctagtaaaaatacaaaaaattatctgggcgtggtggcacatgcctataatcccagctactcaggaggctgaggcatgagaattgcttgaactcgggaggcggaggttgcagtgagcctagatagagccattgcactccagcctgggagacagagcgagattccatctccaaacaaacaaacaaacaaagaaacacacacacacaaaaacaccaccaaaaaaaacccccgaaacagcaacaacaacaacaaaaaaaacaccccactgcaaatagcagcagtcaacagggaagagagagtcagtgcttgcagggctggggctcctggcctgtgggtaaggaggattgaggctcccctaggcctcatgggactgcagtagggtgaggctgggctggcctgccctcagcttgcaagcctgttgttgagcagctgttctccacgttggtagctgtggagtattctaatttagcttctgaaaaggcttgcatagctagtattgaaagaactcccacttactgtatttcagctggagaattacagagaaaaaaggttcaagtggcttattgtaggtcatctcccactctgggatttaaacaaagcacaaacagaacaaagttcctttaaactgggtgccttcatctgagtccctcctgtctgcaaggtttggcaggctcgctggatacagagcccacgcctctcattctcactgctgcctttttatgtttgacccttggatgtggccaacgattcccatggtgacctggattggagggaagtttttctagaatttgaagataaagcatctttcataaatactgcctgttccttcccaatgactagttaaaaattgatagtctgtaaactagagtgagtgcgatccgtgaacccaaattcaggagacagagtttgacgtgtctaaatgtacgcaggggacaatagcaagaaatattttaagctgaatgagcctgaaatataaaagacataggattgttatagatatgtcatactgaaggctgccttggatggaaaatcaactgaaaaaagggcaagcttagtacacactaggtttattctgggctaaggccggtctaggacattcatgaaattacaacttagtgattaggggctatagtggtttagattctagactttagaagtatttacacatcaaaaaactcatggctgcgaagagttttcctcctagcatctgacacaactcctcattttgtaagtctgtactggagtgaattctagacagctggcttgttgtatttatttttatttttagaaatggggtctcactctgttgcccatgctggagtgcagaggtgcaatcgtagctcactgtggccttgaactcctgggctcaaatgatcctcctgcctcagcctccccagtagctgggactacaggtgtgcaccaccatgtctggctaatttttaaaaaaattttttgtagagatggggtcttgctatgctgcccaggctggacttgaactcctaggctcaagtgatcctcctgcctcagcctcccaagtagttgggactacagggacacaccaccctgccgagcttgactagttatattgttcttaaaggtttatagaaggaaggagcttctgtagcctccaaccccatttttcggatgcgttcctttaaggactaatccaatttgaggttctttattctatttcctcagtgggcatgtttactgatcctcaaatgtgcctttatatatttcataagctgtttctttgcattctttcccccaaaggagtagtttccattctttctgaaaaacactgcttgagcctcgtcccttttggaagagcagttctggggtgtgtgtgtgtgcgcgcgcatgtgtgtgtgtccacgtgcatgcgtgtgtgtgcatggggggtgtgtgtctgcatgcctgtgtgtgtccacgtgtgtgtgtttctttggcctcctctcaggctctgggggaaaaaaacctctactaaatcttaagctaagtacaaaatgtgtgcatgtttcactcttgccaacgttttagacttctggtgttaagccctgtggaaatgcaaatagcatagtttttaatacttactctaagggtactatttagggaagtaaaagttactctaaaggcaagattgatttcctgccctcatggaactgacctttcataatagatagcttgttgtccatgctaacaagggcttactacaagtgctacgtattctcaatttgtatcaaaaattgtagtttggggccactggcttctttttggagatggcctgattgattccagactctggatctgagaagctgacggttttgtaccattgccctacacacatggaaacactgcagacttcaaagttcctttgttttaagtgcggtggaatcatagttgaggggacagtgaaggaagaggacagactgagctgaggtgttgttgctgctttctctcaaaaggttgttaagagatcattcatttttgaggaattgcaacaagactgatttttttttttttttataaagcgtagagtcttttaactcaggattagatgaatagcttttcaaatgtgtatgaaagacaagaatcccaaaagattggctctattttaaatagcagactccagggactcaaggtttgtaacaaaagggcagatatggaagagatgaactcccgggtccaactctgagaatagagcaccctcagggctggggatccctgaggtgtcagggaatgccaatctcgctggttccggtttattagctcggggaatctcgttagatatcctcacaataagctagttggtattgactttgcctgacccatattataaagttctaacaagtggaaagtatagccaagctttgggaaatgccatagcatgcagaatagaagagaaaaccagcgtcttaaatgaacagaggagaaatttgagcagaaccaccaactggagaaattaggacactggctggaatgttacagccacaacaggggaaaaaagcagaatatttacttagtgaagacataatgagatggtacaattctctggtgtcaactttcacagaagagctttgtctctgtgctaatgatgcagagagcagggaagtgatgagaaaattgtatagacctcaagaaatccaacaacagcaaaaaaagaatttggagtttagttttgtatcttctgaggtccaggatttttccatctccctaaatttgagaattcaggttcaaggaaggacttggagaatagtcaaaacattactacacttcttaaagcattcttaatggtatttttactagtgaaatagaaaatgaaaacacacacatgtaaataagcatattttattaatcctccaaatgccctgggtaaaccagtttagaaaaccatcagatgcaaagtctgtcatgggtctggtgacgagattaggatcagtcctaattaggattaatgaaacagagtttcccgggaagcaactgtgacaagctgttctttgaattctggacatgtaggaatgatgtgaaagtctagatgatcagcctcatggagtaagggatccgaacctccaaagggaataggcagaagaacaatttcaaatatcttcataagatcagcccacaaatgtttgcctacccgtgtgcaggtttgcaattagaggctttagagcattggttttgattcttaagccatttttatttgaggagaaagatgcctgagagtgtttttagttaatattccttatggcaaatctgtgattttgcaactaggatgcagagaggttaattgactttattaaggtcccacagctggtcatttgggtagaactgagcccctggcttatggctaacctacagagactctccctctctgtatttctaggattttcagtcatttcagagttctgctgtcctattgatgttgttttttttttttgtatgcatgaataagtgctgcaattaacgggctgtggcgtgaactaggggtgtgaatcaggatcactcatcccaccaagttgggcttctgtgtcttcatgtttccacatggaacttggcctggaatagatctaagggcttttccagctccatttttaaaaattgcttactgaattgtgtaggatttggtatttctgcagttggcaaacagaatacaaggtttggtgtcaagtcgaaactggaaccatgtaagccattgcattactctggaacaatcagctgactctgaaacaattcttgttcaccaatgacagtttgggaattttttcccagtttggtagggaatttcttttttgtcatttttgatatgtttgtatgtttttgcacaaaggccactcaaaggttaagtcggggcattttttagagatgtaatgggaatatctgtaaatggtcctgctttagactggattatgactttaggaagcacagggcacgttcagccgcatggccctccagtcatcctatgtgcagtctcacacgttccccactctggggaaattgaggcaaagagaggggagatgagtcgcccatagcctcccttgttgctcccaccaagccaggcccagaattagttcctaacacttaatgtaacgtttaccaggggcctgatgcctgacacaccctttgctaggcactaggattacagtgacaagttaatttggtccagcctgtctccaatttgggcatctccttcgtggctgtggtatggagtggctcagggtataatgcactgctggttgccttgaaagtttcccaagcattagccaagacttaggtgaagaacttggacatggaggtgacgtaggccctgggaagggactgcctaaagatgtatgttcatgggctccacagacaagaaagacatggcagattaaacatggatagaaaagggcatgatgtgtattagaattaaatgctgcagcagttccagctaatctaatttcagtctcttaatctcattgtctttccccttggcagcataactaataaacaatgccactctgcaacagttacataaagcacgtattcaatagtcaaaaattccaagctcttttcttcaaaggttaggtctattttttattttattttattacttattattatttttttgagacagagtcttgccctgtcacccaggctggagtgtagtggtgcgatctcggctcactgcagcttctgcctcccgggttcaagtgattcttctgcctcagcctcctgagtagctgggactacaggtgcgcaccaccacgcctggctaatttttgtatttttagtagagacaaggttttaccatgttggccaggctggtcttgaacccctgacctcaagtgatctgcctgccttggcctcccaaagtgctgggatgacaggtgtaagccactgtgcccggcccaggtctattttttaaatggataaaagaaagagggtggctcaattttgtgacagggtctttaaatttgtcagtttgtgcatttcatcttctggtgccccagagctctgagtgtagctgaaactcatgcccggtatggggaagaaccggggcagggtggggccctttagcctctgggtttggtttctcctctcctggaacctgtattcctatgattacttgccccatattccagagaattccagctctgcagctgtggctgtcgcatctcacactcaaactgactgagatgaacaattactggttttctctccccgcttcccatctctttgtgtacattgctttttgtttttctcttttttcttccttctcccatttctctctttttctttttgttcttttttctctctttgttccttgtttgccctttcttccccgaatccagcaatttgtcttactaccactatattgaattatgtataagccgaagcatcttagttcattcaataaagctttctgtaccctattcaccatgttaaaaatcaagtgaaaacaaagttttatcccttaaaaacaaacaaaactccaacaaccccaacccaactaaattaagtccattcctatttgtatacatctgttaattaatgtatgaattaatgtatttattagataaattccatatccagacacatcctatactggtaatactaaggagaacagacacagtccctaaggtcctaaggttgactatttacttggggagagagactgacaacaggcagttacaaagcaagacatgctgtaggccctgggattgcatggacagtgtccactgtcagtggagtcctgtggagggggtggcgctgatcattcagtgcggggaacaagtggtcaagacatgcttcctggggcactggctcttggttgactatttgggagtgagaaacagtggtagcctttgcccaatagaagagccgcccccaggtgattctgtacataggagctggcctaggagtagcctctggcctgaccctgacatcagggttgagttgattagggttgtgattccatcttgactactcagtctgaatttgctgagttgcaaattgaaagtgaaatcaattacatccagattcagaccatttgattttattttcatttgatcataaacatcacaaaacacgggatagagagagcctattgtgctcagttattcaaataatcctaattatgatcactcattcaaatgattcttaaatgattctttttttttttttttttttttttgaaacacagtcttgctctgtcacctaggctggagtgcagtggtgcgatctcagctcactgcaacctccgcctcctgggttcaagcaatcctcctgtctcagcctcctgagtagctgggcttataggcacacgccaccatgcctggctaatttttgtatttttagtagagacggggtttcaccatattggtcaggctggtcttgaactcctgacctcaggtgatccacccgcctcggcctcccaaagtgttggaattaccagcgtgagccaccgcgtccggccccaaatgattcttttttttaaaatacaatcttttgctgttagcacattttctgaagagggtggctctacttgagccgtacattctctggatgatgtgggcctgagctgcccaatatgaactcaagagtagcgagaaaccaagcccacaggccttatctgctccagggcttttccacctggcagacggaattgaagctcttactcgatcgcagttgtgcctgcttcacagggttgttgtcagtattaaatgtgtcaatacaaataaagctctcagaacagaagcccgctcatggtaagtgctcaaaagtggcaatggtgataatgatgatctatgagcccacctgtttcacatcctcaaaggcctctgaggctgaagctgatctcatcatgtcaactggactccttgtttcattatacaccctgactatgtcgctgaaaacaccccccaaaacatcactgaggaataagtattgagatccagcatacctgcaaggtgaattcacatgcatatgtgcaaaactgcaagcttcatggtgggaccatatcacctcttctaggagactctttttaaaaagcttgatctctatcttaagccacacatgttggaactaagaaatctaagggaggaaccccagatagagatgcagttggccctttgctgaatctcggtccttcctggagcaggcgggcagccctgcccctttatcttctggcaatacaaaggataaaagaaaacagttatcaggtgctgaggggccagatctgagccccgataatgggaatcctgaaacatgagcagcctcttctgtttgcagagtctcatcatgcaaggcagagtgctggaggtagggctataaattgagggtgaaggaaaggcagccctcctaggccctgcgtatcgccagttgtggaattctcttttgcaagaggtcactgagtcaaatgctgtggatggataattttatggccactaataaaatttatagccaaagcaagctaagataataagagtaatcaaacgtccagccctgggacataagaatcccatcctggcctggggtgctggctgggggtgctggacagcacagagaggagtttatctgtctgactcaaggccagcctcagagtctcagaggtgatttgtgtccacatgaactgcgaggactaggccaggtctggggcaagcttcagcttgggcagtaactgctgtttctctgcagacagcatgccaacagcagcaggaaaaagctatatcctatttaaatgcctaaaagcaaatcgtgagcctaagaaaagatctgaaccaccccagctctggaatactacattatggaaggaatgctaactggtcattcacgtgtgacttgccaggtgtgagggaagataaagaaggatgcaagtattactcatgcaagtataaagaaatcagatgacgtttaaccaaagagttgggtttgtgtgggggctttcccctgcccatctcctccctcttctccgagcttagctcctctctgagtttccttcccatcccagttcttcctcctgtaggcctggggcataggcaaagtgggatcttgtcactgaggccaccctgcagaacacacctcgtgacatctatagaggcatatcagtcactggaagacagaaaccctgggttcttggccctcttctcttgactcgggcctcaccgttgatggtccttatgaccacactctctaaaatggcacagcaggtaggtagccacgtggaacaagttgagaacaagtaacactctggtgttgtgggattctctctctctctctcttattttttgagacagggtctcgctctgtcacccaagctggagtgcagtggcacaatcatagctcactgtagcccccaaccacccaagctcaagagatcctcccacctcagcctcccgagtagctggaattacaggcgcgtgccaccatgcctgcctaatttttgtatttttggtagagacagggtttcaccatgttacccagcctggtcttgaactcctgagctcaagcaatctgtctgcctcggccccccaaaggcttgagccaccccacctggccttctttctttttttattgtggtaaaatatatataacctaaaatttaccatcttcaccatttttaagcatgcagttctgtgacattaagtatattcacattgttacacaaccatcaccaccatctaccaccaaaagaactttttcatcttcccaaactgtaactctgcccccgttaacaataactctatgaatttgactattttaggtacttcagataggtggaatcatacaatatttgctcttctgtattatttttaaataaaaactcttttgatgagataggtcagagaaaatccattttattgccctagtttttagtacattttattcaaacaagaacccagcaatagttaacttgctgcaatgtctactgagacgtctaaaccaaaacatgtcttgctgatgccagcttttgccctcttcacaaatcctgcttaggaaaggttcatgacactgccacagtaggcctgaccctgccagggaaaggcatcaccgcggttctgggtagctctggtgtgcgcgaagaaaagagacaagcagggtgagagtgaagtctaaatggatcaacaagtttgcctgataccttggagtcaggaagcacgggaagaaagagttgagtggaatagcttagtgaggtctgaggcctgcctgatccagaggagacactgacaaacacagacgctgcagaagaggaagccgtcccaggttaggaggcatcccagtgcttccctcctcagtgagtcatttcatctgtttctctgcctgcaaggaagaaataaacataactcataaaatgaagcatttcacctcgccgggggagtggcattgaagtgagaggcatgcatctgtgggtgtcagagcaagagtcctctgtagctgcttgtccttgacctggaaggaagggtctggtggggtgacaaagtgacatctgctccttagagggagcctgttcttggagacccctctgccagatacatttttatagtcagctccagaagtgacttgatgtggggattgagacatattcctgcagtcaaagactcatacatagaaagggacataatttttttttctttctctctcttatgagcaaagactgaataaggcttatgtggactctatcactgcatcgtgatgactggagtaaggtgccctccgtccatcatcgtcagctttctattctgtgtctgactgcagtggaacatcggcgtgatcaactctacattatttaactttgatccgggcgtgcattgtttgatcttttcctttgcagattgactttcataatttatattttatagaatacacagaaatgtattctggcatattctaagagcataacggctgacagcatagacacatcctaagacaatactaagggtttacaaattagctgtggatggtcttttccaagataattgtgagttgatttgtgctaacctggatcagaaatatttatcaagcactcactgtttacaaaactataaaagcattaagtaacagtgtaagtagcagatagcaataaaagatgtcccaaggcagtgagatattaattgtgtaagagaaaatgttattaaatgttattttctgggatttgaggagggggagcctgtcattaaatgtcattaattaaagactgagtaggaagcaattgctctccgtagatgtctctacacaggaaacggatactgtttggtgttccctgctgtcttggcagagtcagagggaggtagctttctgggtcaataatgccgtttaagatgaacgcccatgctgacacactctggtagctctcagagtccttccttcagtgtagaagttaaaggtcagcagcttacagattgcaatttgcattgtggaagcaaccttaggaagagccacacgtcttttatcttgattctgtggtcaagatggtaaccacatttgggattctctctttctttgggattctctctttctttgggaatgagtaccaagctcctcatactgaggtatcagtgtagacatttaaatgtggttgaaagacgtgaattaaaagttaaaatagaaggagaagctttatttcgatgtggcctgtgaaaagcagactttcactgctcgttaatggtgcacggaattctcatggacgttgagaatgtcacatgtacacgcacatgcacacgtgtcgacacctgcgcagacacacatgtgcaccctctccctgcagcctggccccttttgctgccacctgtattcattttcccaccaccccgagggatatgatgtgctgtttggaaagtaacagatatccttaaggagtgaaatggtcccctgtaatcaagatggagagctaaaaacaggtttcaatcagaactaaaccaaataaaatcccgtggtgaaaatttagttccccttaaagcttgtgattaggaccaccccgtgtgttttcggccactgcttttagacggtgacagtgacacatacacgtaacgaagataatgaggcctttccactagcactgtagggttttcaaacatgttagatggatatttggaggttttctcaggaagaatcatgtatctttcacagtatcgcaagagaagaaataaattcctaagagtctaacacgcagatgtaagccatagtcctttaaaaataaggctcttggccaggtgcggtggctcacgcctgtaatcctagcactttgggaggctgaggtggatggatcacaaggtcaggagtttgagaccagcctagtcaatatggtgaaaccctgtctctactaaaaaaatagaaaaattagctgggcatggtggcgtccacctgtaatcccagctactcaggaggctgaggcgggagaatcgcttgaacccggaaggcggaggttgcagtgagccgagattgcaccactgcactccagcctgggtgacagaacaagactccatctcaaaaataaataaataaataacaaaagtaaggctcttgattcagaattatgcagtgaggctcaagtttcaggagaacatcttctaatagtggactgcagggaggggctctgagggcagcctcgagttaggaagtggtcctgaaggggagagtggagggagggagatggaactgaggcctgacatgctgcacagaagccacctcagccgaatggatcagcatcccaaccgtggctcctcctcctactagctgatttcccttggggaaggagctcaacctctctgaccctcagttccctctttggtgaaagggttgaattgtcttggaatccacaggtgaccacctcaggactgcagtgagggatctgtatgcatccagtaaagcctgtccttagctctgtcttgtggctgcccacctggcctgggggccagagatggggctggagaaggggcaggcttcctccgggagctcatccccacacccagtggagttagcgtagccaaggcttccagcagagttttacatccagagtcatctttgttataggtagcagcaagaagcagtctctcctgggaagacttgctttgaagtgtggggagtcgcactgacttgtaggaaaggccactgccttgagatgaaattccaaagccaagaggaaaagtgctgttgaggaggtgggatgggaggtcaactcctcaagtccctcaaggaattcagtggaagccactcctgagaaccggctggaggtgggaagcctgaagaatgagggagttcacggtaggggcctgaggtgcgtgaggcttgtttgtgttggtctgagcagggctgaagccgtgggcccagggcctctttccttcagaaacagtcggaagtgaccaagcttcagctcctcctcctccccaggcctcggcacccaggcccggtgctgcggggctcacgtatgggaactgagaaagggaatatggagtcttccttctaggccccacagaggcctctttgacctcaagacttggctagaaacacattttggaagcttccgcatttccaagtcacagataatatttctacacacacacagacacacgctcttattttagagaagggacagaacatttgtctctggctgactacaagtttctttatctaccttcctttcaaatctcctgaggacagagactaagcaaagtttaccttttgtaatcccccaagtctgtctggtgctcaggttattcagtaaacttcagtaactgaggtcagatggtagaaggaaggggaaaaaaacgggaatcagaggcctgtgtttccagctcaacttccctacttgacggctgagtggctttggaccaatcatcggactcctctcctcgcctctgttttctcatctgtgaagtggaaacaatagccaaccagtctacataacttaatgttgtttccaatgtgccttctatgaggaaggagaggttatcagcagcaaagggatagacacatctgagggcatcccttatgctgttaatgactgtttaattgtcatagaatatggatcactgccattctttgcttgacataaaaacaactcagagacacactgtcaccgtttcagagagcttcagaaagaatttggattggagtgcttctttcatagccagatctcatgtagtaggtcattattttgtttctttgattaataggacaattcggttacaaccgaaggtactgtaaccctgcaaccctagagaggatttgcagggctgaggaagagtaaattcctattagcaagtatcttggtggcaagcaagatggcaccttggtaagaagttatccatccaactcagcactccaaagacctgcataccagtgtatgcgggaaaaaccatagccggtctaacagggaggcgccttctcgctcagaatcatctacaatggatatgattgtaattgttgaagaagctacagctgcttctactgagagcaagcctcgctcttctgtttttcagaattataaaaatggagctaaacagagataatggaagttgcttttggagcactatcttgcagactgtctttgcacaagatattgacaggaaatgtctgcacgtttcttagagcctcctgaatcttcagcatctacttttttttttttttttgcctgacatataccaagcacccaacacatggttgttcatacgaatgaatgaacaaatgaactagtagactaaaaaagaggcagctcttgatccccaaacattgtggagccaaaacactatcctttgacagtgatgaggatgggagaaaagactgtcatatcttaagaattaaacaaaataggccaggcgcggtggctcacgcctgtaatcccagcactttgggaggctgaggtgggcggatcacctgaggtcgggagttcgagatcagcctggctaccatggagaaaccccgtctctagtaaaaatacaaaaaaaaaaaaaaaaagttagccaggcacaggggcgcatgcctgtaatcccagctactctggaggctgaggtaggagaatctcttgaacccggaaggcggaggttgcagtgagctgagatcacgccattgcactccagcctgggcaacaagagcgaaactctgtctcaaaaaaaaaaaaaaaaaaagaatcaaacaaaatagaaaagcaatgaaatgttttaaagaaatgactcttacttaaaagacttaagaaaatttacgtagatacacgtgagcagtagaaagtaagaatagctcagatttatttcacaaacatgttttgagcatctttgtgtgccagccattgtattgaccttggtatacagtggtgagcaaaccagccttagacctagagacctggggcttttgtgtagtgggggaaaatgacttactattaaatgcatgatatgaaccgaagtggagatactgagggaaaagattgaggctctgtaaaagcatccagcagaggaagcataggctggaagaaggcttctcggaggaagtgaggcttgagcttacatctgcaggaaaagtgggagcattccatatggagagcaaaggccccacggcagaaggagcaggaggtgtgtttgaggaccttgcccgaggctggagccctggagtgtgaaactgagggggaggtaaattagcagttcctgtagccaaatcctggtctgttatttctgaaagtctgtcatctctgaagaggatactgggcataaatacaaatgagaacatgatcttttaggtggtgagagtctatagagcaggcatttggagggatgccctctccccattgtggaactagcagaacaaaatctaaagaatgcacaaaagaaaccaaaaaatgagctgttaggttctaaggagggagggagtgtgatggaaagcacaccatgagaaataaggacatggacctgcccccgccccatcatgacactggctgtgtctgaaaaatggagcaggaaaggcagcgtgactaggaaaatgtgcagttttaattttacataatatttgtttttttttagaaaatattttctaagataaaaaatgctaacatttgtgaatagtggtagtggatacatgtgtatgttttattattggatttttttctatatatcacatttttttaattagaaggggaagacttttttttttcttaaattagaagaggggcagttaaaggaaggaggtaggtgctaggaatggtttaagagtcagggtcctattcctagatacaaattggcttgggcaaattgcttctctggtcttcaggtgtcttatctaaggagaagagttttgaagatgatgatgttggaaatcccttctagctctagaacgttctgtgatcctgatttttaaaaacaattgatgattgaatagttctatttataggcttgggaatttggtgtctcatgctcactaatccctgattctttaaaattaggagaaacaatcttgcttggcacaagatagccaatagctttctagtcaggaagctcgtgcattgaaattcatttgcccagagacattttcaaaagctgtgaacccacaggtcgctgacatcccttctggaccagatgtgggaatctggacccacccagaaagctgtgcctctgtgtcaggcatcctgccattcaccacacgcgttccagcggctgctctctggctttgcagggcacctgcaggacagtttgtgcataaggaatcccttccctccaaattttagatgagaaatatggtaatgaaaggaaataacccaggcagagtggcttgtttcacatgtcacggtgtgtcaaaatcagatgtatgtcttagattcttgggggaaaaaaaaagttgtcgcatgaatttgggggttttgttttgtctttggacatggtccgggaggcatgatgcgcgccctggagcttcatcgatgctgttgagtggggatgacggtgtgcatcgccacatcctcagctttccagttgtttcagctgcgccctccaagctgccctgttccgcggggacaatagcagccagtggacgggagcccgcaccacacagcagcaaaggaagccggaggagaggctctgcgggctctctgctccgtcagcaggaatgtcctccgggccagcagctgcctttgcagccacctctccagtttctgtcacttgggtcaagtttccttataatgcgttaaatgaatgagaataagaaagtgtgtgttggcagaatttccgttgaataatgccaaggctttccaagtaagagcatgaatttaagcggagcaaagttcccagtcaatgggattcagagtaatggctattctgctaataatgaaaagtagaaatgtttttacttttaaaggttcacaaatgggctactcttagggctcgctggcctattcagttacaaagtggaaactgttccggatctttgctttattgcacttgtatttagtaggtgattggaaacattttccacttagcatttaagggtttgaatagactggtgactttttttcaactaaagtttcctcttttttaaaaaactgacatttttctttttttgcaagtagactgaagatttcaagtaacaggttttccaaatacttagactctgcctgcataattattatatttgccgtggggattagcacttttcaaaagtgtatttctacacaacatccttgttttgccccaaagtttgattcttcacagcttattacgtagatttaggcaaaatggaccgagctccatccactagaacttccattataaaggcaatcatttcgaatgaaacagaagccatttatcttaatgaaccagcaggaaaatgaagtctgttgaaatgatctgaacccttcaaaaaatattggtaattcattgtggctatatttatttttattagtttctctatgttgcctgttttattgactttccacagcaaaccaccacccccaccagcaccaccaaataccgttgtattttgattccttatgttctttattagcaggcttacttctctcttcatagaactatgcctttgccccactgctccatttcagagcattcggggctattcctggtaagaagccagcattagttaatgttactgttctggtcttgggctgcaaagagtgcatggataatggttcatgttttcccctccaaatggagggaagacacagacataattgaaacttacaatgtcgggggataattttataccattatttttaatgaaaacggggaagtatcctagctaaaatgctggaaaatagccttccagtagccctaagcatccacgtgtaactgaatgcaggtgggatagaaacctgttccctcttgcctccctcccccaaatagagagatgctgtcagtggtcaggaaaagcagtgagccacaggtaatgagctccgtatccattttctttgtcagatctcccagctgatgacagagagtagccgggagggactaacagaagcagtgctgaaccgctacaatgcagacaagccttccgcctgcagtgtcccagcctcgcagggctcctgcgtggccagcgagacttccacaggcacatcggtggccgcctccttctttgcacggtaagagagctgttcagatccttggttctttccgatgagcccagctggttagcccctcacgtggactagctcagctgaaacactagaaagagtttggggccgttctgtgatgtcattcattaagacagagtttctcagccatggcactgtgacctctcgggccagctaactgtggtggggactgtcctgtgtgttatagggtgggctgcagcatccttggcctgtacccctcgatgtgtgcccgcagtaccctcctccagtcgtgactaccaaaaatgtctgcagacattgtgagaggccccagggtcgagagtcgctgctctcttgatgtgtagctccaaagatgctcttttgcagcatcaggactttgtagaggcatccctctggtgggtgtttccagatttatcttctcattacagaaattgaactgcttaaaagctattaaatagatggcaggttttctcccccgcttcttgacagattagccagagtgttatcaaatactctccagctaatcttgggaacttcaaaaatacaagaaacaaaaaagaaaggtatttcaacaatgttttctgcctaattttagcaacatggcagagacggggcgggagacgaaggacagctgagcaggaaaggacttcagggattgtctggttccatctccttatttatgaatgaggaaaccgaggaccaggaaggttcaactaggagtgagtttatagcacagccagaaatagaaaccggattgctctacatttttctgtataactcatgttttaatttaatgctcagaactgaaccttggaaaactttctctgtctaagatttgcaagctcctgagtaaacaggacatagaataaatgcgatagcatcagatacgaaatcacaagaccttttgggttccagttgcagcagttctgcctcagtttcttcatgtataaaatgaggatgatacctgctctgcagggtcgctccgaagactaacataagatgatgagaaattataaagtactgtagaaatggttactactatgtcagtaagaaggaatattgtgtggctttgcttgttatctttatgaatggtaacatccagaacacaaatatggggaaggggctctgattaggacagcggcaaggcagaggaggacagagggctaagaccctggatgatgggaccctaaaggcagcacacagggcttgttggaagaccggctttgagggtcttcattgtattttggtgctgtgtttattgtcgtatgaacacttgggacaacttgaatgtgtgggaagtaataggaaatatgtataggctggccacccaacaatggggaccattgtgttagccctgtctggacatgaatctctgtgttgtcccagaccattaagcagggagtccaagctcactgggaggtcatgtccatgccatttagggagagaataaagacagggaacagttatgaggaaatgtcacaagcacagaagctcctaggaggttattagaacatgttcaaaggaggctgactaagaagccatggcatggcaggttcagtttggagaagagaaggactctggggtacatcatggatgccctcagctatctctcaggctattgtataaatggagacttggttcgttctgtagagcaaccagttatgtaggcaaaggctaaataacgagggaggagacggacctcccagctcagaatgaagaacttgcaattccgatggcttcaggagagagtgagatttgtgtccctaagggagatcaaagttatgttgagtaattacctggcctcgatcctagagggaacattcaatgctcagatgggaattgacttccgacgtgcctttctaacctgaaattctttgaaagtggagtcttccgttcagttccagccagagaattttacagaaggttgactgactcacaaggcaacccagaagatttgaagcaggaagaaataagaagtgagggttcccaattggcagaatttaaggagaacatgagttctccttaaattcttggtgcgaggaaaccagcagcgtctttggagctggggaaaggatgtggaaatgaggggggcctgggaacctcatagtactggacaaggtgtgcctgaggccagaggtcaggatatcagaggaggatttacgaacaagcaaacacacagcagggaaaggaataacaaatcactagcgaaagcctagggtggaagggagatactgaggcaaaacccaaaatgtatgggccagtgatgtcaactggggcaggctctgcaggtgatgctagcagcaaacaaagacttgaaactcatgacttcagaacgacaagggcttgcagtatgagctttcaaagagctggaaaggatccctaaggctccccaaatctttactattactttctgtgcagtgaacgctgatagtacttggagcttcatggtataagcattaaaagtatgtggtttgtattcaaagggtttacaatgtacagtgggaaacaagtaccatgtgaaaaagaacaattctttctatagatttcccccccaccctttactcattaccatattttgccatgttattctcatcattattgatgagaactattattagctgggctttcccacctcccagcgagggaggcagcatattaataacccccctgtcactgaggggcacccaaagcagaagtgtgactgactggctccaggctcatcctgtcaagaggcagaaccagggatgtacctgacagttaggtccccaaacgtccatgtgataagccaaaacctgcccagcttatgctgtcagacagtcaactgagttcaaagagccttttggttttagctgaagcaaagctgtgtaaggggatggtaatgacagcttttgataagtgtctgtcctcataggggtttggggcagagtcagctcctacacctccaatctgtgctcaccactttccactcttcctgcttgactgcaatggagagagagtcctctgagtctgcggggccctggaactctcctatagctccaagtcaagacacaggggtggcctgctttcaggaagctgtcctgggctgggcatggtggctcacgcctgtaatcccagtactttgggagaccaaggtgggtggatcactagagaccaggagttcaagaccagcctggccaacatggtgagaccccgtctctactaaaaatacaaaaattagctgggcatggtggtgcatgtctataatcccagctacttgggaggctaagacatgagaatcacttgaattaggaaggtggggtttcggtgagccgagatggcgccactgcactccagcctgggtgacagagttggactcagtctcaaaaaaaaaaaaaaaaaaggaaagaaagaaagaaagaagcaacagctatgctgggggccatttcgttttatatgggagggatggcatttgctaaatttgtggccaatgtggctgacgtatattgagcactgagtgggcatcactcactattaactacctcttcatatgcaaacccccttcatcttcacagtaaccctgtgaggcagagcctaccattttctctgttttatggataaagaagatggttccctgagttactgacccagagccacatagccgggagtggcggagtgggaaatccatcctcgtttcctctcacttgagaccccaggttcctattctctgtgctaaacagacacaggaagacactttattatagggttttttttttttcaccgtaatcatgaactgatgattgcttataaaacaggtgtgaaactactaggccctgtaatttgtttgagaaggtgagtagaatgacaataacaaaaacaacagaaaaacccccaatttgttgaagatttgaagcaggaagagataagaggtgacacatttgttgttgctcttgaggattcctacctttacacggtgttttcctgttgacgaaaaatatgtctatcctgggtctggaattttctggataaatgttggtgttcatctccatatagcgtcgctctcattcatgcagatgtccacttttctctgtgatattaacctttatttaaaatgtatttatttttattttaaaatcttttttttgagacagaatctcactctattacccaggctggagtgtagtgacgtaatcacagctcactgcagcctcagcctcccgggctcaagcgatcctcccacttcagcctcctgagtagctgggaccacaggaatgcaccactgtgcccagctaatttatttttattttttgaagagatgagtctccctatgtttgttgcgcacgctggtcttgaacacctaggctcaagcaatccttccaccttggcctcccatagtgctgggattatagtcatgagccactgcacctggcctaaaatttattcatttatttatttttgagatggagtcccactcactctgtttcccaggctggagtgcagtggcgcgatctccgctcgctgcaacctctgcctcccaggttcaagtgattctgcctcagcctcccgagtaagattacaggtgtgcaccaccacatcagctaatttttgtatttttagtagagatggggtttcatcatgttgcccaggctggtcttgaactcctgacctcaagtgatccacctgccttggccccccaaagtgctgagtattgttttgattgactaataaacattgtatatatttacggagtaaaatatgttttgaaatatgtacatattgtggaattagcctgtgtttttaaatgcttactttctagaactgtgggtggaggtctgggtgaaccttgttacatttcaaattcaatgcctataaaataagaatttcaattttgaataagcagtgtgtggtctgtgctggtccacacacggttactggtctgtgataagtatagaaatggagaggaagcgtttagaaacatctgctgatggaataattttctgtctgttgaatctaagaataaaaaatcggggcttgcattttgtgtataactagaagtaaaagaaaaattggtccttcacccggatagtttgagatgcactgctatagagaacgatggagcatgaagcacctgttctgtgcttttcttcctctcacgattgtctttaaatggtcagcatcttagtagctgtctttgcttcagaatttcagtaccttccctttttttttcgagaaaagacactgtttctggaaaaaatagtaacagtcacccagaaaagagatcgagacaactgatcgtcaagttggttaactattatgtgctggctttgaacatcaagaacatttcaaacgagggccttttttttttttttgcatgattttcacattaatagaaaatggtgaagtagggtatcattagattttcccatttgctgacagttcactttgaataaaggtggacttaatgatgtactttaccttataaagtatggagtacatgaaacccaataaaaactcttgggtgaaaccctagctttgtaggttgaggcagtggaaccttcatgtatatttgaagagcagttagtggattctggattatgcatagaattgaaccctgaaacagaaaatgaatcttttgggtgacctcatatctttgcattgattttctttcccaaataaccattaaaactcatgggttttgtttttgttttttttgagatggagtctcgctctgtcgcccaggctggagtgcagtggtgcaatctcggctcactgcaagctccacctcccaggttcaagcgattttcctggctcagcctcccgagtagctgggactacaggcgtccaacaccacacccggctaatttttgtatttttagtagagacggggtttcaccgtgttggccaagatggtctcgatctcctgacctcatgatcctcccgcctccgcctctcaaagtgctgggattacaggcgtgagccatggcgcccagctgtgtttttttattcatggagaaaattagcttctgtagaattttcatctacattcagagcaagagtttgaaaaatggtgaaaatggacaaagatcacatgagcacaaagacactgtcaagttttggcagagctggtatcgccagttccatggcgttggtgagcacagagacttccagttctgccctcagacatcacttctaaattgtcatatttttggtgttcagcttttatgtttagttgacagcctttctaccaaattctaatcagatttccaagtaaaattatattaagggcattttttattttccgtgattttatttaaattttcctgttttcttaatataaacaaatacctttccattctgttatctcaggttctgatgacttcagatcagaacttactatcttcaaatcctttattctgtttttttgctcattattgactctgttacattagttagagcttctttctctctctcccccttcctctctctccctccctcctccctcccttctttcctcccttcctgtttttccatctgctcttgaagattcctacctttacacagtgttttcctgttgacgaaaaatatgtctctcctgggtctggaattttctggataaatgttggtgttcatctccatacagcgtcactctcattcctttctctgggatccctgttgtctgctttctcttccacacttgccaagctgtccctcactttctcccactgactcctctaactccttgccgtcggcccaaacacattcctttctcaggacgtgattgtttttctgtccatctcaatctcttgtgtggtatcttccatcgttgtttttgaatggctccctgtgttacctgaacagcattcttcagtcctcttgagcatgtcactgactgttgtatgactgatttgaccagtatccccttgggtccagaggttgccgtagtgttaaaaccaagccccgctcaggccctggggtcagggctaggctgagcagagaggactgacctctggctcccaggccctgccttcaggaccacgtggcttctcttgttagttccctgtggggcctgctcttcgtgctgtgtatcctcatgtgaccatacggagagctgttactggtctgatgaccattattgccgcactctcgctgagaagcaactcagatagcgccttgctgtgatggtttcagcaaatgcttttcatatatgatcttgtatgatgaaggctttctttagtccctgggcccttaacagtggtacttggttatatgtttggagttgatgaagtcagagaaggatgggaaggagcgtggaactgttcctgcttcttttgttcttctgtcaggtacagttccctttagggatgctcccttcttccccttagaaatacatcaacaatattaccagagaaaaactaccctaaacataccacaattggtctcaggtgatctaggcggaggaaaaattgagctgggtgtctgagatccaactcctaggcgtcaattgactgtggagagacagggcacaagttctgcctccagtttcacaacttggaacagttaatgtccagcactgtttccattatgatagaatgatgcctttacaaaaacaaacaggccaggcgtggtggctcacacctgtaatcccagcacttcgggaggccgaggcaggcaggatcacctgaggtcgggagtttgcgaccagcttgaccaacatggagaaaccccgtctctactaaaaatacaaaattagccaggcatggtggtgcacgcctgtaatcccgtctacttgggaggctgaggcaggagaatcacttgaacccgggaggtggaggttgcggtgagccaagatcacgccattgcactccagcctggacagcaagggtgagactctgtctcaaaacaaacaaacaaacaaagaaaaagcccttttaggagctcatattgtagaacttcactgtattatttttttttcctgtttcttgttttgttttcactgaagcatattttgcttacccttagttccttgcacttgccagggtcccgttctgacttggtgtctgttcttttctccttgccccagtgtatcccctcgttctcacattccagatctcagtctgcctattccaggacttcccatggaagcagggctaccattgagcttcctgtgggacacttgtggtcggggccaacatgcataattgtgccatctattcacagaaccagggcgcccaattgtaggagtgagtggggcttaaatccagccaacactgtgccagcctggtggaaccacctcctctggggctctgtcaatcctccttggatgcaggtaatgtctgggctcatgttgtcctggccggccctgcctccttcactggtggccaagcagtgtcaggacatagatctttgaagggctgaactggaaggcaaacccctaccctctggtttcttatttatttatttattcctgacaggtcgtagctttactctgcttagaaaatactccgttgatttcttggaaaagaagggactctcactcatgtatattgatgaagtgaatttttaggaatcatagttctatgaatatggtctcactttaactcaccttatgaaaggaaaacattaagaagcaaccaagggtatatttagtgccatccgatttcaagggccctagaaaacagtctcaggcatttgctgtgtgaagctgaacctcctcagttgcttatgagacagcgaaagcacagaaggaaaagtggttgtaatttaacgtctacactgttttcccttctgctaaaaacatgcctaaaacacctcaaatagataaccctaacatccaatatgcaaccccagcaacccccaactgttctgttgttgggggtgcagtccgtaacagaagtggcattcatagcttggcacacaccactctgagatggtgagctacgctaaagaaaatgaccagcgtttgcggccccttcccatcttctgctgcagggaatgtggtcaggtggagcattttctgattaaacaagtcctttgtctgactggcggccggttggggtgttggcaattggctcccaacatctgggaatcatttccacggctttgcctaggttgaaaactcagttcatgtcttgatgtgaatgtctgaaggcaaagcaatttcaacaagcctcaagaatcccagggattcttgtaagatactctcagggttaaggattctagttcttattgcacattttgcattttttgttttaattgatgctgtggtgggggcgggggtggggggcagtggttaggagagaaggatattgaataagcaaacagaaagctggagaagcccaggcttgaattctcagccagacactgacattctgacttgaggcaagtaacttaaccttgctaagcttccgttgcttctgttcaatggagatcatcatatctgctttataggattatggagaggattaaatgaaaatgtgatagtccttggtaaacttcatccaaatcctacagataatgtgaagatggcacgtgctataaaaaggatggagttctgtcctcaatgaattctcaacgttcccttttgagtagatgacttttcgttgagacctttacaggctgtttaggtggccctttgttatctgtctaacgactgtccaggccttctgtggcaattataaagatctggtatcatgtctctgagaacaaaaaccacctacagaaggagctgaagagcaattcgcccttaaatctcacctgttacgaactagatgccattggtgatggaaaatatcagtgacccatacggagagagaaacctgccctcaagtagctgcattttagcagagctccaggtaggtcactgctcacctctaaatcttctgaagaggtttcatttttttgttggtttttgttttgttttgagttgcagtctcgctctgtctcccagcccagattgcagtggcacaatctcggctcactgcaatctccacctcctgggttcaagcaattcttccacctcagcctcccaagtagctgggattacaggcacctgccaccacacctggctaatttttgtattttttagtagagatggggttttgccatgttggccaggctggtcttggacacctgacctcaggtgatctgcccaccttggcctcccaaagtgctgggattacaagcatgagccactgcacccggccttgttgttgttttatagccctagaaaaactggtaccaaacaataaggaagagactgaagggaaaaaagaagatggggaggggctttaagaattctgttcccatagaactttgtgactcactgaaggccagcaagctggaattgtcgtgatactcacagtggacattaacgaaaacagtgaataaaagtaaaaggggaaatgttctttctttgtgaataccctcgtgatctgaactgggggctgaagagggaggatggggtgacatggagtagattcaggaaaagcagagtagaaacctgtgaactgaaggagaggaccaatggatgaggagaggatgcaattttatctagtatatgttgcgtaaatttgtttcctggtctacacttctaccaccaccctaatacagtaccgctataatatgtttccttccttcagcactgactcatttaaaaatcgtactggccagccaggtggtgccatggctcacaacttgtaatcccagtactttgagaggctgaggtgggaggacagcttgaggccaggagttcaagaccagcctgggcaacatagcaagaccctgtatctggagaaaaatttaaaaaagcaaccaagtgcagtggcacatacctgtaatcctagctacttgcggggctggggcaggaggatcgcttgagcccgggaggttgaggctgcagtgagctacgatctcaccagggcactccagcctaggcgacaagagtgagacccttctcttagaaaaaaaaataatcataatagcctacatttttgagggcttcttatatgccacacactattctgagttcttgacacacatttaatcttcagaagcccccatgagttggccgtgtttttatcccattgtttagacgtggaaactgaagcacagagggcagaagtaagttgaccaagtccacacaactagtaggcaacgcatagggatccgagccaggtgtctgattccagaggccacaagccagaatataagctccaaatataaggtggggacatttgtgtctttgttcttggctgaagctccagcacctaaaagaacactcaagaaatgtttgttgaataactcaatgatggtcttagccaccatgctctcctgcctccaaactcaagatgggttgcaatggacaggggtcattaactaagcagtctcaatgcaacgatctcaatgtgagaccaaagtagagaatgggtacaaagtgcaccacagaagctatagggggaagcttttggaacaactactcttttttttgagacagagtctcgctccgtcgcccaggctggagtgcagtggtgcgatcttggctcactgcaacctctgcttcctgggttcaagcaattctcctgcctcagcctcctgagtagctaggactgcaggcgcccgccaccatgcccagctaatttttttttttttttttgagacagagtcttgcattgtcgcccaggctagggtgcagtggtgcgatctcggctcactgcaacctctgcctcccggcttcaggcgattctcctgcctcagcctcccaagtagctgggattacaggcatccgccaccatgcccagctcattttttctatttttagtagagacagggtttcactatgttggccaggctggtctcaaactcctgaccttgtgatctacccacctcagcctcccaaagtgctgggattacaggcgtgaaccactgcgcccagccaatttttatatttttagtagaaacagggtttcaccatattggccaggctggtcttgaactcctgaccttgtgttccacccaccttggcctcccaaagtcctgggattacaggcgtgagccactgcgcctggcctgaccaactactgtttatgcttctaattttgttagttactaaaatatcgctttcagtctcatgcagtaaaagcaaaaggtttttcagtgacttacaaggctctgtgcacaccatctgtcccctgccctcttcctctgccatgttcccacttgcttactctgctctaggcatattgacctccttgcttttcctctaaaagtgccaaggccattccctccccctaggctttgttcttctgcttggcttaaccagaccttccttcagatctttgctcaaatgccacttccttggtaaagccctctgtgacctccctgtttaaaattacaataatcccacctgtgcacccctccctctcgcgtggtacctgctacattaggaatatttgctgaatgaatgaatctcagacaaatgggagatgggcggctaagtctccagattgtcctgcattgaagtgcttggagaagtttgcgaattttcccactcagttcaaaccacatgctcaggaattaaagtgttctttcagctttcagatgttttcgggggatagcattgtaacaaagcatgaaaaaaagcagtgttgggaaattgagattcttattacagtgggagtacctggttgtcatttcaagatgaggatttgttaagggatgggacaagggatgctgcctgggacaataaaccaaagaaagatttaaaacagagaaaagagttattagttacaggactagcacaaacaaagtagggctctccatctttttcctgtctcgctgaaaacccatcttttcttcccttgaataaacttctttgctttctgtccccctgctttgatttattattttaattctatagctgtcttcgtgaagtatgtaaagcatttgggggtaaaatcatgtggaagacattatagaaactaaagatgtgtgatattatgtggtgttgggtagaggctcagcgtgcttatgaatcacacggttgatgaaaacaccaatctgtccagggccattgtctatcagctgtataagaaattggctcattgttgagggtacaagaaggaggaatgtaagggggactgccggaataattcggttagaattcggtaaaaccggagcatggagaggtctggttgacatccctcctttttatactgagagatgtccctgaaggtgaggtttttattttcttgcctctaaaagggaaataatgaatgtttctatttcttctgtcctattactctgtgatgaatgcttcttttatttttatctgagtctaactccctccaccatacttagcatcatgcttgcatcatatccattaataaatggatgttgaaagaatgaatcaaccatgcttgaaaacttagatctctcttgcttttcaagagactcaaatatttaaaagcagctatggagccgtgtgcggcggctcccgcctgtaatcccagcactttgggaggccgaggcaggtggatcacaaggtcaggagttcaaaaccagcctggccaacatagtgaagccccatctctactaaaaaaaaaaaaaaaattaacagggcgtggtggtgggcacctgtagccccagctacttggaaggctgaggcaggagaatcgcttgaacctgggaggtggaggttgcagtgagccgagattgcgccactgccctccagcctgggtgacacagcaagactctgtctcaaaaaaaaaaaaagaagaagaagaagaagaagaagtaagaagttatgggattgtgcttgcaagcagcacagtttattgtgtagcatcagagttttcatcattccaagtattagtgataaaaataattctgaaggataaatggcatattttccattgttgatttcaacacagttagactcagcagtgcaccatttctgataatcatctatcattttactcagcatatgcaaaaaatgatcttagcatcacatggcaattagatgcttttttttctggcacctggtgtgcttgttcatgaagtgcactgagattccggaaatataatttcaaaagcctagaaataatggcccatgtcattttcttggcattcttcaaaaccaaagccttaagagtccatggtttgtccttttaaaccccagcaacggaaagaaagggccttggcagtgacaaagaaagagaaattctcttgggggtctgtagtgaaaagggatgtaatcagtaccaggcaagccactttgattttttttttaaaaaatgaacaaatataaaccattactcaaaatttctttccagtctttttggtgcttcagaatataaatgtggctcatttttctctaataagtttccatttattatcatagtcatctcttcagtgctcaatcaaagtggcaaggttgtatttgtggagaaaacagaatattttgtaacatggctatcctgaattttagaggcacttactagggatggaaaaactggtctgaagttcttaggcatactcttaccacctaaaagtgttcagcgataaaaataattgctttgtttttacctttgaggaactccaagtatcaggttaaaaattgagagaggtagtgaaagagagtcagtgattccagtgtttcagaaagtctgacctggccagggtccagctgggctgcaagaacctcctttctctccctgtctctgcagctccatcactcaccattctctccaagtcccttgggaatacatggggagaacctagtggccatagcagatactgctggtccccctcttcccccactccttgccacctcatcatttgcttgcacaaaaccttatggttctcaaggcccagcacctgtgactctgcccgagggtttcctctggctgtgggagccccctgcacccacacagggggcaggccacttgggagcaggcccaggtaagactggcaggagttggtggataaacaccccagctctcttgtctctaggtggggataattctgaggcatggtctactctgtctcccatatttccctggcaggattgagccccagttgtctgtgtccataacctgcttgagaacacagactctggtatcttccttccttcccttctcccttcctcactgtcttatggctgttacctagagtcacctcccagttaacctaccagcaccctcatccttgtacaaggatatgtctgagggaacttggtataagatattggaagtatatgctcttttgtccatccatccatccatccatccatccatccatccatccatccatctctccatccacccattcatccatccatccatctctccatccatccatccatccatccatccatccatccatccatctctccatccatccatccatccatctctccatctacccatccatccatccatccatccatccatccatccatccatccacccacccaaccatccaacaagcatttggtaagctcatgctgtatgccaggtattgtgttaggcaccgaggagagcaagaggacagccaccgccctcagggagctctcagtccagcagggcagccagtcccaggataggacagtgagaaaggacatggaggttcaagacagaaaaattcataaagccatccagtatggcttttgctctcccggtgtcttcaggttgtttaaaaattaaaggtggctttccagcacctattattatcagaaatggtcttattggttcacttgcttactagtccattgcctgtctcccttcctagaatgtaagatccatggaaagaggtacttgtctagcttattccatcattgcttcctcaactcttagaacaggggccaggctggcgcatgataaacatttggtaagtgcatctcatagtcattaaggcgtctgctgtggaaagtttgtcagtttcctcctgttcctcccggagtaagctcatccatgttgaaatatacccaagctccactctggatgcagtgttccagtgcactgtggaagtctctgctcaggacaggagggatagcaagtgtgctgcccaccctaggtccgaggtggccacttcctgctagccactgctccttgggaacaaaggacacttgcccaagtgtgtccctaaggtgagcgctttagcatcaagaattattcaactgaaaggagttggccggacccagtggctcacgcctgtaaatctcagcactttgggaggccaaggtgggtggatcacgaggtcaggagttcgagaccagcctggccaacatgacaaaaccccgtccctactaaaaatacaaaaattagccaggcgtggtggtgcgcacctggaatccgagcgacttgggaggctgagacaggagaatcacttgaacctgggaggtggaggttgcagtgagctgagattgcgtcactgcactccagcctgggcgacagagtgagactctgtctcaaaaaaaaaaaaaaagagttttcttctaaatagcttgctgagtttctctattttctttgtacactgaattctaaactctcagttgggagattctgccaatgaaacactctttgcagtctcctacctctgctacctgggcttgcttgatgctgggtgatgaaccacccaggtacctacacaacaccctggttgtcagcagtggcagtggaaaggagagtttgaatttggaatgtagacattttgtaaacaggttcagagaagtaactgcccaccgtcctccccactgtggtgtgcaaagctaaagagctgactcatgtgatcgtgggggttggcaagtccaaaatcggcatggctggagattccagcaggagttgatgttgcagcctggagtccagaggcagtcttaaggccttcaactgattggatgaggcccacccacatgaatggagggtaatctgcttttctcagagtctactgactttaagtgttaatatcatctagtaaataccttcacaacaacatctagactagtatttgacaaaacaactggacaccgtagcctagccaagttgacacataaaattcatcacctcaagaatcagcactaggtttaacatgaaaacaacttgtatttagtgcaatttatcaagtgcatattgagactggctgaggttcttcctggaacttacttctctctctcactttctccctctcttttttttttttttttttgtgagtcttgctctgttgtccaggttggagtgcagtggcatgacctcagctcactgcaacctccacctcctgggttcaagtgattctcctgcctcaacctcccaagtagctgggattacaggcacgtgccaccatgcctggctaatttttgtaattttagtagagatgggattccgccatgttgcccaggctggtctcaaactgatggcctcaagtgatctgccagccttggcctcccaaagtgctgggattacaggcatgagccaccgcacctggcccctggaacttatttgttagtattcaggctactgaggtgttgcacctgcagactctcaggtggcactcacccattctctctctctgccgagctcccgtgttccatcctttgttcctcagtgtccccacctgttaacgtgttgaatgtaatccccgtgtcttttggataaatcagagaatcccatatcatttgttacttaggatcctgagcattcagttttagctttcacactaaagatagagaaaataaaaatagataccattaatctttacacttctcctgtggtcctgattgccaaccatagtctgaaagatctgcagtggatttattactttgcatgttctttatttcctttaaacccgggcgtgtgaggaacgttgatttatggagcctagatcatgcttggctggggaatgggaggagggaagcaaagtgttgttcaagctgcagtaaatttaaacatcactagtatttctttacacatgcaagggggaaaagtcctaacttaagtccattgctacaggagctcataaattaaaaataacaagactatttcctatacacctggagcttcaaaattacatgccgttaattctttgattgcccccttcacaaaagagccattgagggtgacaactcaaacaagatctccaccacagccgtgaaatccaatcagtgattcaccttgtgtctttgaccttgttcaagataaggaagtgacttgtctgaaacatagactctaagaatttagtcccattatttttttcctcaaacttttccctctcattactctcttctctctctctcctctctcgttttattttttctaattttacataaattttaaaacaaatctaacagcatcagaagaccaaaacacaggaaagtcttcttgactttccactatgttctgagccataaatcctttcgtgtgctcaaataatacaccccagctggtctgttggatgaatttggttagcctcttaaatgttttagcacctgtacaccacagagctcccaaaagcgaggaaattatgtttcctcctgtccccaacggattgcttttcacctgggccatatagctgctgtgtgccactttacagaggttaagactgagcagtcctggaggacacagaaagctctaaagaagtacagacacaacttcaagtcctcatatattttacttcttcatcttgttctttgagaactacgtttactttctttgagaaaatgcataaaggagaaagagaggatatactttattttgatttttagagaaccttgaaagtgtcatgccagaagcggtggaattgagttttcactcttataccacccagacctttcactctaggtatataccaaagaaaaatgaaacgaaggcgtttgttcacgtcgagacttgcccgtgaatgttcatggcagtgttattcatcaaagcccccaaaatgtaaactacccaaatatccaccaactgataaatgaatagacaaaaaaaacatggatgtccattcagtgagatactcttcagaatcctcaaacgattgctacacgcaacatgactgaatctcaaataatgatggtaagcgacggaaaccagatcccacctctacagatggaaggctacatatgctgtgatttccttcagtgcaggatagacaatagaaactaatagagtgacaggaagcatatcagtggttgatgggaagtgagggtgggagggaggaaccgattacaaagggctgtgaggaaatgtttgggggtaatggatttgcttatgatcttgactgtgatgatttcacaggtggatacatatgacaaaactcatcaaagtgtgcagtttattatatatcagttacatttcactaaagccaataaatgatggccaggcatggtggctcacacctgtaatcccagaactttggcaggccgaggtgggaggatcacttgggtccaggagtttgagaccagcctgggtgacatggcaagaccctgtctctacaaaaaataaaaaattagccagacttagtggcatgtgcctgtagtcctagctgctctggaggctgaggtgggaggattgattgagcccaggaggttaaggctacagtgagccatgattgtaccactgtactcgagcctgggcaaaggaacaagaccctgtctcaaaaaaaaaaaaaaaaagaaaaaagaaaggtaataaatgaattttgttgggattagagaaaatgttttgagatggggcgagaattgtcttaaaaagtaaatagagttgcaataagtggtcgttttcctctggaaggaaaagtgttaataataggaacccctatgaaatgtattggattggcctcattaactattttttcccccaagggctcaagataagaaagtaccacgggaaatctccaaattggtacacaaatctaaattattttaggtaataaaaaatcatcaaagtagaataaacgggaagaaatgagcagaggagctttaatgagagcaaggagaaacattttgggtaaaataattcaaattattcttatgagatgatagacttggagaaactgtttataattgaggaaggggatgtaaggactttgttgccagaagattcagcctaagatcaccaggagtaactaaatgtgttggacatcatcggaaagaatattgaaaatattgaaacaaagtgaaaggtaccaccttacccttgggcaaagtgaacacttctttcaacctagaagttcctataaagttctgacaggccaggtgcggtggctcacgcctgtaatcccagcacttggggaggccgaggcgggcagatcacgaggtgaggagatcgagaccatcctggctaacacggtgaaaccccgtctctactaaaaatacaaaaaattagccgggcgtggtggcgggagcctgtagtcccagctactcgggaggctgaggcaggagaatggcgtgaacctgggaggcggagctcgcagtgagccgagatcgtgccactgcacaccagcctgggcgacagagccagactctgcctaaaaaaaaaaaaaaactaaaaggttctcacaagttcaacttataaaagggaagcaaagcctggtgagcgggtagagactcccatttgagaacgggcatttggaagaactccctagtccggatgacaagagctagggtgcaatctgagtagctcatttggcacgtggatagattattcattaagttttggaactatctcttaagacggggaagaagcagccttagggaacaacaaaacaagctgtattccacatcctaagacacagtaccgactgagaatataaatctgcaggtccagattaatccacagatggcaggctgcttgcaagctattagacaaagccaggggtgttcgggagcagatccccaacttctgactccatagagggtcacagcctgcctctcttgcacagaaagagatggaattctcagctaagtgccacaggacttctgtccaatacactagcccttctagtctgtttctgaaatagtcttttctacatcattttttaaagcggtccgttattccgagcacttttatcatgtaacacatcagctgccataaaagcttgaaggtggctgaaagtgggcgaggatctagaagccccttgggcaagtccagattggaaacacgtcatgggacctccttttagggacagtctcacaggcaggctgccgtaggatgacctcaggtgtcccatgttttgggtgggaatgtcaacagagcagatgcgagaggcatttcacccaagcacctggattgtttcatgcctgaaaggaggcaagacaggaaggtataaaatccagatcggtgcagttgctcagaaaagggacaggtgacggcctggcgttctctccttggcttcctgtggaatttcaaagttactgctttgggattgtgaactccagccatctgcgtgcttggaacctggagagcaatccagctggtgtctaccaccgtaattaagaggggtgtggagcatgtaggtgttatacacccctgccaatcaccaggaaggagctgagtgtggaattcacatttgaaagtgaagatgcaggaagcctgatagctcccaaaagaaacggccaccagattttgtttaaaacaaacaaacaacaacaacaaaacacacaaaaacaacggaagggtacactttagaaaaactattgactttttcccaagatatctgtacctcagccacaactacaaaaaagagtctcttcctctgttgctggcatctagtctgctgtaattgtagaattttctgatgctccatggccatcgttgcttctttgtcctccccactatttcatccgccggctcctgggaggggagggttccagttcactcggctaacgtgtgtgagtccgacagtaacgagcaacgcagaccccgggaagaggaacaagaataggacattcctatatttttatgtggagattgataatcaaggctaacaatcctggcagaaggtgaacaacacattaaacagaggggaaaagataataaaatatctcctgatgcttaacaatcgttgggtggaaacattccctggaattatacagctgttgcatttgatggctcataaagcctcagtaaagtccgtcaagggccttttttcttggcgagggaccattcttctcatgcggttatgatagcatctgcttcctgtccctggaagtgcacagaatccacagacactggcagacggaagcaggggaggagccctactgcagaggcatctggccctttgatggcttttgggtaacttctgatctacagggcatcgtatcaaaatgcagactgagatttagtgggtagccagtgagcacttgctaggtgccaggcactggcttagggtatttcattaatcctgacaactatgaggtcagtattaccatttttaaaacaatactatggaaaacagagccctagactccttaagaaacatacccagggcatgcggctgacaagtggcaggctgaagtccccacgcctggtagccttttttctgttactgcaaagatggaggaagaggcgagagttgcttcctgtccgtgctctgggtacgtgtgaaatcttgtgcatcttcttataccgggtgttcaggcacatgtgtgttgagaagggatgctgttttccagaagactcaaaaacaatgatgggggtcctaggtgacttactgttttaggtcggggtccccagaagcagatcttgatgaagtgaggatttctctgcaagtgatttattaagaatgtggtcctcagggaaactgggaagggagtaaaggaggcaggaaagggaaagagacaagccaaagatgagtcctttctcaggcaaaatccggtggacagcggcttttagcttcagcctgaccatactggggaactctgggggtttgtcctgatgggaagcagcagaggtgagcggtcatctccctcactgttcaccctgcagtcatctccctcactgttcacctagagctgtcatctccctcactgttcacctagagctgtcatctccctcactgttcacctacagcggtcatctccctcactgttcacctacagcggtcatctccctcactgttcacctacagcggtcatctccctcactgttcacctacagcggtcatctccctcactgttcacctacagcggtcatctccctcactgttcacctagagcggtcatctccctcactgttcacctagagcggtcatctccctcactgttcacctagagcggtcatctccctcactgttcacctagagcggtcatctccctcactgttcacctagagcggtcatctccctcactgttcacctagagtggtcatctccctcactgttcacctagagcggtcatctccctcactgttcacttagaggagaggtcatctccctcactgttcacctagagctgtcatctccctcactgttcacttagaggagaggtcatctccctcactgttcacctagagctgtcatctccctcactgttcacctacagcggtcatctccctcactgttcacttagaggagaggtcatctccctcactgttcaccctgcggtcatctccctcactgttcacctaaagcggtcatctccctcactgttcacctagagctgtcatctccctcactgttcaccctgcggtcatctctctcactgttcacctagaggagaggtcatctccctcactgttcaccctgcggtcatctccctcactgttcacctagagcggtcatctccctcactgttcatctagaggagaggtcatctccctcactgttcatcctgcggtcatctccctcactgttcacctagagtggtcatctccctcactgttcaccctgcggtcatctccctcaccgttcacctagagcggtcatctccctcactgttcacctagagcggtcatctctctcactgttcacctagaggagaggtcatctccctcactgttcaccctgcggtcatctccctcactgttcacctagagcggtcatctccctcactgttcatctagaggagaggtcatctccctcactgttcaccctgcggtcatctccctcactgttcaccctgcggtcatctccctcactgttcaccctgcggtcatctccctcactgttcaccctgcggtcatctccctcactgttcaccctgcggtcatctccctcactgttcaccctgcggtcatctccctcactgttcacctagagcggtcatctccctcactgttcacctagagcggtcatctccctcactgttcacctagagcggtcatctccctcactgttcatctagaggagaggtcatctccctcactgttcaccctgcggtcatctccctcactgttcaccctgcggtcatctccctcactgttcacctagagcggtcatctcccttactgttcacctagagcggtcatctccctcactgttcacctagagtggtcatctccctcactgttcacctagaggagaggtcatctccctcactgttcacctaggatggttgccgtggggaggaggcgggtggtgaatcccaggccttttcagcggccctccaggcctgcaggttcaagcaggctccagtggcctgagggcaggcctttgagaaagaggctgactgttagaagcagaagcccttgaaggagcacacagaaggggtctgggctaagcagcagcgtggcgacctacacccgcccctcctccgtaccttgcaggaggcagcgggtgctgaggaaatgggaaaagagccgcaagattaaccagatacccgtggtattttcaagcaacaccatctgctgtatttccacagaaagggtgttgattttcctgaattctagaggtggtgttttcatcactgagttcagatgcctttgattgatgagccaccttcaaaccaagtcagcatgaaacagaagcttgggttagttcacgttgtttgatataataggacaaggcagactaacgtctcttgagaatgaagggaagtttttcctacataaacttccacattctctcacaaggtgggaaaataaaaagggaaaatgacgtgaggggttgcccaagacagggatccttcccatctgaaaccatgctgtgacatgaagtgccacagattccaaaatccacgtgtgtctttcttcgaaaccaatagccacgtgtaaaaaaaattatatagcgtataaacccatagcagcaacattttaagtggaaacagatttcttccattttaaagaaatgtcaactgtgttagggagtctggggatccctcgcatacatcccagctgaacatgaaccccaaattcctgtgtaatgtatcgcagaatctgtcctttgctcacttcgtatctgtcatcaatcaacactgcagactctggaagcaagcatgttatggttttactcttgtgactaagcggagacaagaaggcatttttctcctccttgggctgtttggaaagcatagaatgaaatccagggcatggtcatcatgaattatagcgcagccaggctggtctagaatctctcatcttccaggcaaccccagccttggcagcaccatcaaagggtcatggataacaattttaaaatgcagtgaatgaaagtgttcatatgatgctaatggaatcataatttttaaagtgtcctcatcctttagagatatagactaaaatactggcagatgaaatgctatgattatgggacttttgtcacagtaatactacagagagaagtgcgtgcgtgcgcgtgtgtatgtgtgtgtatgcatgcatgtgcgcacgtgggggggatacacatggaataagattggttatggattggcaattgttgaagctgagtgacagacacataggctattctatttttgtatatgtttaaatttttccataataataggtcaaatagatcataagcatagtgtatactcacagatccctccagaagaatctaaatgcccagctacgctggtcaccgagtatccgccttgctctcccaggtgtccataagcccctgccacagggctggtgaggaagcctggctcccagcttgtggctacctttacacccatcactctgctctcctcccagaactccattcctccagtcacagggcccccagcataacaattccattagcatccttccctcccttatttcttgcaaaattactcttatcatgaattccagggactgtgttcatttgagtggcatcatctattactatttcatttaccccatcacatttctttttctcacataaagatacagtcatttgtcacttaataacatacacgttctgagagaggcattgttaggtgattctgtcattgtgcgaacatcatagagtgcacttaacataagcctaaatggtgtagcctactgcacacctcagctatatgatgtagcgtattcattctaggctataaacagtatagcatgttactgtactgagcgctttaggcagttgtaagacagtgctaagtatttgcatatctgaacatatatgaacataaagaaggtatagcaaagatacagtgttatcatcttggggactacagttgtgcatgtggtctgtcattgaccaaaacgttgttctgtgacgcatggccatattaaggtatacactgggtttggctgcttctatacaaggagtttggataaatttcatatagtgtcagtcaaaaaagtataagaaaattaagccaagtataagaagctgtgatttgtcccagacatcatgacctcagaaacagagtgtctgtgtaggtgactgctctacaataggctcaggaaggcatcgtgtctgagggcccaggctacagactcctaagtgtgtttttagcccccaaggccatctccttttggtcattatggaaattctggagcttaattaaaaggaacctagagtgcaacctttagatttaagagtaatagaaagaataactccaaaacctgtttattgtagggcagttaactcttatgtgagctcttcatctcatgatagaaaagggtccctggtggaggggtctgatacaattataattctgctctcccccaatccccaaagcatcaaaatagaactctggcccctctcattatatagagaagcaaatcgttactgtgatcactagggagttcccaccagcattgctgtgggtcctgaaagagaaaaggaggttccatgatttgggaagtaagtttcattttctttcatatttggagagatagtttctgattacagccagtggtctcttctgtaaatataggtgggccatggactctagagactctcaggatataatctgaaggattgattgcatatgaacctgcctacagatgcagctcttggttctgttttggctttgcctcctcccctcactgtgtggtgggtggagctggctcctctcaagctggtgccttcctggtgtgcttgctgctgctgtggtgcccgtggcccatctgaattaacatcttctgcggtgctttagggtgctttgcacaaagtcacttgagactgatggtgctaaggactcatgggtaatggtctagtcttaatgttctaattcaatccaatccaacttttttgttttgcatatctacaaagtgcataggaatatgcttcgtactgggaggagaactcatagtgcttaataaggactgctatggtctgaatgttggtgtgcccctacaattcccatatgggaaacttgatcttcaatgctatagtattaaaagatggagcctttaggaggggatcaggtctcgagggctccatcctcatgaataggattagtgcccttatcaaagaggccagcaggaacttgtccctcccttcgaggtgggaggcggggctggactctggagctgggctcagacaccagaccaaaatgaggactagataaaacagggaaggggcaaaagcagcttttcataagacatgcccaccagtgtgccatgtccgtttactattgtcccaacaacactcaggagttaccgcccctttccgtggcagtgaccccacgacccagaagttcctacccttgtcctagaaatttctgcataaactaccccttaatctacatgtaattaaaagtaaatataaatatgactgcaaaactgccttgagctgccactctcagcacactgcctatggggtagccctgctctgcaggaccagttatggacctgtaacactactggagctgtgacaccgcctctttaataaagctgttttctgctaccctaccaccagctcgcccttgaagttttactgggtgaagccaagaactcttgtgggctacgccccactttggggctcacatgccctgcatcaccttttgccataggaagacacgttgaaagcactatccattagtaatggcccttgccagacaccaaatctgctggcactttgatcttagacttcccagcctccagctgtgaccaataaattccattttatttgtatgttttttttgttgttgttttttcttgagacagggtctcactctgttgcccaggctggagtgcagtggcatgatcttggctcactgcaacctccgccactcaggtgcaagcgattctcctgcctcagcctcccaagtagctgggactacaggtgcacaccaccacacctggctgatttttttatttttttggtagagatggggtttcatcatgttggccaggctggtctcaaactcctgacctcaggtgatctgcccacctgggcctcccaaagtgctgggattacaggcatgagcgaccatgcccggcttgaattctgttgtttttaacttacccagtccaaggtattttgttatagcagcaggactggactaagataaggactaatcttagtaggaaggaattaacatggaccttgtgagttatggctgatgctcaaaagcctggaggacgccttgcagctctttccacatggtgtgttctggaaacactgtcttaactcctctcagtttggtctggagtttgatagtcatgtagatttgggattggcatcacaacctatagtcaaagtgatgaatcctcttgcataacacaactactttgcattttaataattttaataactttgataactaaacatttactcaaaaatgtatttcttgaacatctatggagtccagatattggggtctactaggctttggctgtccttgtgatttttaaaaccagaagcacccagaaactattaaatccttaaagcaatacaaaatattcacagccatagcatgctcagtagagaacctctaatgcctgaaacaaggagactgtttactttagcacgtcagtacttgaggatttattctgtgttgcggcttctggcctgcgagttcagaataacatgatgtggatttggaaccaaaatgaacacagcaacagacagtctatcacgataatgggaaggagctggagtctgcagctgccatcggcatcaaagatctagcttttattgagctctctatatcccgacagatccttgtcgtatggaagtgatttgcgtaggctgagaacagtggggtgaaaagaaccagggcatttctaaaaaccagtgagagcaatttacaagcctgagccaagaaacaagctggacacaccacaaaggaaatgcattttcccagtaactttttttttttggaggaggctttagagggctggcctgtgaattgcatttgtttatgaattgtctagtaatcacttgcattgtcgctggatcaggaggggctgtattttcttcccacacctgatttccatgattcagtgcacctcaagagctccatttgtgtcaccttctctgtggctgacgtgtgcgtttccactttgtactgttaatcagttaagtgaatatgagctgggaagtgtgttcaccaaacacctggctagcccgaagctctttacatttgacaaaacgggagacagaaattagaatggcttttctattttagtctagattatggaattctgtaatcaagattactttaaaaccatcatttgaatgaggaggtaaaatagccttgatacttcactgctggagaggaacaatagacaaactcaaaagacaaaaacatgaattttaaatgacagtttgtcccaaggacatcgtcatactgtgtgctttttacagtctgcttgttatcttatgcaattattgccaatgtgttttgctaatggattcattgcaagtggacttaccctacgtggaatgaggaatgtccatatgtggtagatgtgttatttattgatgaggagaggaaagtggatcaatgtggtctttagatgtgcgtgctttgccttgggaagcaccagcattgtcgtctgaactacaattggtgtgtatctgggtggaatgtggtacccgtggtgagtttgcttgttctctttccgttggcccacttgcagcaaccaactgttgcctggactcggtattttgggggccattttctcttacttttatctgttggccttgtggttccatctgtaggttgctctctccgtctagcttggaaacaacataatgattccttccgaatcactggattcacagggttgagggacttgcctgccactgacattcgttgactgggattagaatttgaaaagattttcgctgttgcctcaggtgttctgaaaggtggaatgaatcatttccactcagttttaatgctagagggagaaaggagtcatgttaattagatgggaaagatgatctaatcctttctcaaagagcctttctataaggtttagggtactgtccagccagcctgcggctgcgtgagactaatgatgggtactgggctgttgttccatttctgctaccattcattgttggtgcctttggtaaataattccatttcattgtgacttcatcttctcattgggaaaatgagactggtgatgttgcgcctcttgggttaggcgtattctgtggtaggatttagagtcaaaagtgttttttatactaaaagacactatggcacatcttcgtaggacattagcttttctttgaagatctggtggtggggggaaggggaaccattttttgaacagtaaaaaataaagagatatagtatggaaaacaatgtgaaatgtgaatgaatttttaagatagatattttaagatgaatttttaagatattttaagatgaattttaagatgaatttttaagatagatatgctgctaagtaatttcttgctagatttcaactgctttggggtgtgtcttcctatggaaatgaattcctcgtgcccacggccattacatttcctacaacggaaactttgacttttgtttttttttgaagagacattttgacttattttttattctaccgtttttctatttgctacctcatttatttctacttctagtttgttattttcttccttctgctttatgttattcttttttgtaacttttagaatttggaatttaatgctttttaaaatttttatcaatataagtatttaggccataaatgtcccactgttcagtactttaattgtattttatgtattcagatagatagtgtttttattaacatttcgttttagaaattctgcaatttgggtttgtagttctccctttacccaataattacttaatatcaaatttttaaatttctgagggtaacagcctctttgttttattacatttatttatttctggttgtcttctattatgatcagataatattgtttttattttttaatttatgaatttattgagatttgctctgagttagttaatgtatagccaatttttatgaatttcacttgagaaggtgtattctcctttgggtacaaagtataatatgtatccagaagatctatcttttttttttttttttttttttttttttggtttttgagatggagtcttgctctctcacccaggcaagtgcagtggcacaatctcagcttactgcaacctctgcctcctgggttcaaaaattctcctgcctcagcctcccgagtagctgggattacaggcacccgccatcatgaccagctaatttttgtattttttgtagagatggggtttcaccatgttggccagcctggtcttgaactcctgacctcaggtgatccacccacctcggcctcccaaagtgctgggattacaggtatgagccaccatgcctggctaagatctatctttttaaaaaaattatttactgtggcaaaatacatttaacctaagatatgcgattctaagcatttttagttgtacaattcagtggcattaattacattcacattgttgtagaactatcaccattacctgttttcaaaactttttcatccctccaaacaatctctgtaaccattaagtaataactccccactctcctcccctcaacccctggtggcctccaatccactttttgtttctgtggatttgcctactcataaaagtggaatcatacaatatttaaccttttgtgtctgatttatttcacttagcataatattttcaaggtttatccatgttgtagtgtgcatcggaattttattcctttgtatggctgaataacagcatatcattgtatgtattatatataccatacttttttatttatttatctgttcatagacacttggactgtttccatctttggctattatgtaagtaatgctgctatgaacgatggtgttcaaatatctctttgagtctctgtgttcagttcttttgggtttataactatgagtggaattgccgagtcatacaacacttgtatgtttagctttttgaggaaccgtccaactgttttccacagcggctgcccattttacccatcagcaatataccagggttccagtttcttcacattctcgacagtatttattttccttttttttaaaaaaagaaaaagttatggccattctattagatatgaggtggtatgtcatgattttgatttgcatttccctagtgactaagagatgatgttgatcatctcttcatgtgtttactggtcatttgaatatcttctttggaaaaaaaagtctattcaaatccttcgtccattatctttatattgttgagttttaggagttctttatatattctggatacaaacatttatcatatatatgatttgtaaatattttcttccattctatagtttgtctttacacttttttgataatgtcctttggtgcacaaaagcttttaattttagtgaagtccagtttatcttttcttctgttgcttgtgcttttagtgtcatatttaataatctgttgtcaaatcctaagttgcaaagatttacctgtatgttttctcctaagggttttatagttatagctctcatatttgggttctttacctattttgagttaattttttgtgtatggtgtgaggtaggggcccaacttcattcctttgcatgtagaaatctggttgtcccagaacactagatctgttttattgatcatgttatttagatcttctatagctttatttttttaaaaaatctccctgaattaccttggactaagagtggcaatttcaagcagcattattaagagccatacagaagcctgaggcaaaaggaaaaatcagtaatactgcatcctgtctttatataaaatataaaattttcacattttattcatcacaattttttgcatttatttttattttttaaagtattgcattaaaagattattgattttggttcctgagtttttgccatcaccttgaattatgtgaccaagaagagtgccttttcaccttactatagtcccagccctggggtaaaggctcctaatttgagtgtgtttctgtctatgtcttcttgcagctcatgtggttttgcatttttgaaagcggttgccatgtatctggtataaaaatattcacaagtgttttacttctgctgtaaattgtgactttttctattacagtgttatttgtcgtaatactttttggcatggattctgccttgtctgttatcaggattacaaacgataggggaaaagataagacactaacaagtcttcagtttaccaatgatgaaatcagggcccaaggactctggcaacagttgaaagaattatgatcattaagttaaaaatgtttattacttctaaatcctgatattaaagtaacagcccagcgtacttccatgtagaaatgatgtcattctgaaatggtataaataaaaattatagtcaatattctcatcatgttcaagcagggcatgggccacaaacccacctaaggacctgggaagggcgggtttcaataaccttcaggctgaatgccactcatacaaataagaagcgtggaagctgagggaaggccaatcagttgaagtagggtgattcagcccactcaatatttgaaatattggttttaatgagatcctagggctccattttagagctactagaagttttatgagtgaagaagggagctgttttactgcactatacagagtctccttatctttcccttttgtcattcttgccataaccttatagcctctaacttaatcagcctggcttccttcacgtaatacagcagcacttaacattgccttcttacttttcttctaagtagttctagtttctatgtctgagcatccagggaggtaaatgcaaagaaggatggaaataaaatatggctcagctgtggcctgagcagccccttccaaatgcactcacggcttctctgcacatcttgatatgtgaatgggaaagaaaaaaaagcacattttggtccagcaggttttcttccctttgtctccctctgaggtgctcagaggcatcagtaacagagcaggaaggccctggccaacaaaccttagccttttcctttgataccttccattgggagccttcatacaatgcatttgaaagcactttgtcagcagactcctgcttcaggcaaacattgagaaaactattgaggaggcctcaatggaaaggatctgatctgccccagaaactgccctagttctctggcaggagagccaccagcaggagaagagaagtcctctctcctaccccattttttttctttctcctttttcctctcctttctattgtaagaattgtgggaactctctttaaatgaaaataactctcaggctgagctttgtctcccaatgtggataaatgcccagatatctcatatcccctctgtaaagctggagtctcagttttggatgatcacaaactatttgggacaaatgtttgagctcaaggagaaacacatggtaggtggtgtgtgcatagctttttctaaagcacctaaaaattgaatacttgttcatcagcctactgcttgcaagccctttgctaccacttgctggtctgttgtttgcgcctctgcaggctggctctgtgtcatgtttgcattggtatccgatctctccctgcaccaccccttgctcgattttaattgaatttaatgatttctgaacccctaagcgtctatcactttttaaaatccatactacaggccgggcatggtggctcacgcccgtaatccgagcactttgggaggctgaggcgggcagatcacgaggtcaagagatcgagaccatcctggccaacatggtgaaaccccatctctactaaaaatacaaaaattagctggggatggttacacgtgcctatagtcccagctactcgggaggctgaggcaggagagtcgcttgaacccgggaggcggaggttgcagtgagtcgagatcacaccactgctctccagcctggtgacagagtgagatctgtctgaaaaaaacaaaacaaacaaacaaaaaacaacacacaaaaaaacatactgcattagtttctacctacagtttcagtataagcaaatgcttaaggtgacgatgccaagagaaataaaagctctctttagctgccttcttctcccgtcattgagaagagccttattagatacagatggatgaatattcaagaagccagagagtgtgaagaagtgagagaggctgacccttgccctgagcaatgctagactcttggttgggaagttctgttctgccagcacccctgaggccagagaggccttgctggtcttctctgcgtctccctcaggacatggctgcccagtggaggacattcagccactcagcactgggtatgatcttcccttaacctattcccgtctatcaaaatgaagagccacttctagatctaaatttctgtaattatctgataatttatgttttattctaattacaaatctggcccattaaaaaaaattgagactgtatcagggtataaagaaaaaagacacccatgattccaggagtcagggataaccattagtggctttttagtgtgttaccttctcatcttttttcatacatctgtagttattttgcagaattagattcctgtgtgtatgcaacattttcttcactaaccttatctcttgaacatttacctgtgtcatttagtataaactgaaaaataaatatccgtgaagactctagatcattacattatgtggattatattttatttaatgaataccttatcgttgtatatttaagtgttttgctgtgataaatgatgctgccatgaatatgtttgcacacaaatctttgtacacatctgcgtttatttccttagtatataattctagcagtcaaggtgttttgatatttttaaggcacttaatacacaatgccaaattctacaccagcactatatgaatgcccagtttctggaacccactccaatactgaatgcgatctttgcgtatttgatagtttaaaattatacctcactttaaaagttgtttccttttcttgctcatttggttgaatgttttcatgtgtctatcagccatttaaattatcctgctaaatttttttctgtggcttttagtcttccttccattaggatatttgggtttttcttagtgatttttaagaactctaggattctattattttaaaatataaattgagttaccaaaatagtttaaattttaacaaaactgctgtagctggcctccttttataaggtaaccttgttattgtttgccagctgttgtgcctggcacagagctatgcatacccaaggggctacataaatgctttttcattttttatttttatttttatttatttgtttacttatttattgagacagaatctccctctgttgcccagtctggagtgcagtggcatgatcttggctcactgcaacctttgtctcctgggttcaagcgattctcctgcctcagcctcctgtgtagctgggaccacagctgcatgctaccatgcccagctaatttttgtatttttagtagagatggggtttcaccacgttggccaggctgggctcgaactcctgacgtcaggtgatctgcccgcctcggcctcccaaagtgctgggattacaggcatgagccactgcacccagcccataaatgcttttttaatgagagaatgacctattatctaaacataattgatgtacagtgttggttagcagagctagtaggagaatttttagtccattaggagttataagaaaagcttttagaatgaattgtcccagaaaggagagctggaagaaaaaaacccaaaacaatattccacatccacatatatgacctaatgttagcggaacatcacagaggacaaatatcgcaaatcagaacaaaaggacagctcagaggtatttttcaaattgaacaaaattgtatgcatgcaaaatataaatagaatgatattagaaagattttatcaaatcttaatgtttcggcacttttttcctgctgtttttaaagaaataaaacatgacagaacagttgacacctctgcatttctccttttatctcatccccctttcatctataacacaggtggctttgattttgaatatggtgcttatcatctgagtgtgtgctttcatgctttgatgacataagtgtacaaatggtatcatactttgtttcctattgcaacatttcttttctcattcaatattatatatttgagattgatccattttaatagtattacatcataggagatttcacaacttatttattcactctctcatgtatggtcattccagtattttgctcttgcaaatgttgctacaacgagcattgttgatcatgctcccttttgcacacagataagtttctctagggtggaaatggaattgattgctaagtcataggtatggatctccttcttttctagaaagagccaaatcatttttcaagtttttaaggtattatataaatacctgcatttcccccaaggacattttacgtaaatgatgccagttaatatttgtgagtgcttcctatgggccaggaactgtcctaagggttttatatgattccacacatttgatcctcaactattcatttgacaagtgaggaaactgagattcagagaacttgaggatcttggccaaggtcttatagcaagtgccggagcccactcaaacccctcggcagtgtcgttctcaagccctctctcttaaccccaggctgtgctctaggtgctagaaagacactacccatgccagtttatagggatataaaggcagcggctatttaggctgtaagaaaactccaacaaaccgaagcagccttcctagagcattgctgttgtacagataggaagaagaaccagatggttgctcaatgtgtccaaggtccgcccgtcagtgactgatccaagactaaattccaggctctagacgcacatggcagccaggttctttgctccctggctctcgctgtctcactctcccttgctccctccttccctgtgtattcctgaaggcatatagctacatcttcatgtgcttttaatttcttttagcctagagtagacgctcataatagaaaggtcaaataaaattttttaggagtagtaatggatgtaatcttgtacatgtacatgttaattgcagcactttaatccccattctaagtaccaaactttccggattaatttcctgcatctgttggtaacacgggactcagtcttctgaccagattctttgcccaagggccctcatttactaatgagtaatcactgcaatttcagagaaaatgctactggtacactcatgtttgaacattcatcaaatatgacgtgagcccagttaggagagatgttagcgtccttagcctacaaataagggcatagaattaaatctccccacgctataattttgttggggttattacttgcatcaatgtttggaacagttggtgataaaacgtttcatggtcttacagctcagtagataggagcatgtcatgagtcaggcttaccaaaggacttactgcagacttacttccccttgcctcctgtgattcaagccaattttgcaaagagaagacagaggtggaagaggaagtcccttcagcaggaatgcatttctctttgtgcacatatcacagacacacagcactgacacactaattatagctttaggttgagcatttccagtttctgcattttgtttgcaaacagcccattatttctatcctgtgtgctggaaaaacacaaaatgaagcagtctaatcactactgtttctggtaggtccagctgtctacctgtctcccctcttttggttttatttttttcagggtgggcctgtaactcctcttctatccccacccgattttgttttttggaatctttctaacctgcctgcagaccaggggttgcagttccagctttccatgatcttacctgtgttcagccttatctattttgtattgaaagaaacagtcaacacagtcaaatcctttataccttccttaagactgcactggtgtggcctacatagccacctgtgtgccagctgctgtttgtcactaggaagacagggtgggatgtgcgggtggtatgaccgaggtgtgaagaatctcagggttggctgtgtcagtgaaggagtgaacgggcactttggggtcacctgaactgggagaactaagttctcaagcagcaaaaacagaggcacaaaagtggataaaaacccaatagtgcagacctggagctaggcttcttctctcagtggtggcacagaaaaggatgaaagtctctgaaatgtgcacctgtgattcaggttgccacccactgaaaaatcatgattcaagatctctcctcctcataaaccttttttttttttccctgcctgcagcctaagatagaattaggaagtcaagaaaggctctagatgactttcagagtgttttttgtttgtttgttttttctttttgagacagtctcgctctatcatctaggctggagtgcagtggcatggtatcgtctcactacaacctctgtctcccaggttcaagtgattctcctgcctcagcctcctagcagctgagattacaagtgcctggctaatttttgtatttttaatagagacagggtttcaccatgttggtcgggctgtctcaaactcctgacctcaggtgatctgcccacctcggcctcccaaagtgctgggattacaggcgtgagccaccacgcctggcccagaggtttgttttttttgttttgtttttgtttttgtttttccagaattagcacatcttctcttctctgggtcatttttctcttaaatcagagattgcaaaatgtggtccaagggtcaaatccagcctggagtcccctgttttggtaatgtttccttgtaacacagccacccccattttttacaggctgtctgtggctgcttttgtgatacgatgcaggagttgagaagttggacagagaccatatagtttaaaatatttaccaccctagcctttgcagaaagttcgcccaccccttagagtacagaaaaagaaagatttcagagatgtcagtttgggaaggtccttgaaaagtcacttggcaaagaaaagttgtgagaagaaggttgatgttttgtcaaagaaatgcaacgatgacagatgccaacctgccttttcttccagcggcagaggacctcaggccgtggtgtgcatgcccgtgtatcggtgtgggtatgtgcacctgcacacatgtgtgcttacacgcagctcaaaacggtgccaccctgtccagagttattttggccatcatggttcaaatcaacagacttttctggaaagcttctgcacacatgccatgctcagaacaggaggtgcaaagatgggaaaggattctgcctgatatgcaaatagtgaccgaaaacaaatagtaaggagtgaggctgatggagagctaggggaaacaactcactgtccctgggagggctgcagaggacccagcacaggcgttctggggtgtaatcttccttccattctcgtgagagaagctgagtggaaaccaagagcctggcttttcagtgaggacatgaagcctctgatagttgccttccctctggaggtgaagcagtcctggaagaaaacatattcttacctcaaattccaaaacaacatgtggggactctgttgagaagcctgggtgacctagggctgacgtggtagaatccagactgattctgcttctgctttctcttaaagtcagctcagttttcccaatttttatctttttttttttcagggtctctctctgtcaccccagcaagagtgcagggctcactgcagccttgacctcccaggcccaagcaatgcccccacctcagcctcccaggtagctaggattacgattgcaccccaccatggttttcccaatcttataactaattagatccgctcatcacgtgtcctgcaagcatgcagtggcatgtcacagtgcccatctgacagcagggcagggtcgtttgttgagagaaacccactgaggaggaaataaattaatgtccatcctttgctcccatcacctccagctgcaccatccttcaccaggacccatcagagcttccccggggatgctgccctgtggttctcggggaagctgagagctctatgttgcatcttccagggcacctgtggtctccgaagtgttggctgcaagaatggctaagcagcgcactctcttcagacaagaatagtattttaattgccgacagaatgcagatatcgtttccactattgcctctgacacttaattttaggccgggcatggtgactcatgccagtaatcccagcctttagagaggctgagcctggaggactgcctgaggctagaagtttgagaccagccctggcaacatggtgagaccctgtctttaccaaaaaaagaagaaggagaaggagaaattaaaattagccaggcatggtggtgcatgcctgtagtcccaggtactcaggaggctgaggcaggaggccaggagtttgaggttacaagtgagctatgattgtaccactgcactccagccttggcaatggagagagaccctgtctcagaaaaagaaaaaaaattaaaaaatgaaaaaaagaagaagaaatgtaagtttaggcatcttgaaggcaggagattttgactggtaatggtggaaggattttgcaaaactccatgagttgacctcattcctcagaaattccattgagaatggagggtgttatgtgaaaatccgaatcacaggggatggcttcgagacatgtggaaagaatgccgccattacatatgcacgcgtagtgtttgccccagaggaggcttttgaaaagttcatctacaatgtgctaaagtcgagttttgcagtgacttcctagcgcatttagactgggcatagtttacattactgagtatttatcagccagcaaatcaaagccagaaataggttactcctttgtggagcaggagacagtgactgtcctgggaggaagtgactgtcacagcaatggattcctttagtagcatcttcactgtgtattcaccgggtacccaccgtgttagcgatgacagccaccctgtatcaggtactcccaagtgtccgttcccctgttactgagcactttacaggcactcttgttttgtgctcacagtaaccattgagggagatgaggcacagaatatgaagttagttgccaaaagttgccagagctgggatttgggctccaggtggactgactttagaggctgtgccctccatccttgccctgaacaacctcctgtgaagaaatcagtgtgaatgaatgaatgaatgaatgaatgaatgaatgaataagacctgaagaggcaggcaggctctgggagatgcagagacaacttctgcccagtttgtgctcaggttgtggagacaaggcttcctacgagatgcacacacagaaatttggcagaatgggtaagtggatagcacacagtatgaggtgggtccaatgactgctgagattccctctgtcctccacccacactttctcaacggtgtccttctcagaagagaacctgcttcttcgaccggcctggtaggaacagcactcaccacccatttgtgtgccagtacaggtaagtaagagtgctcccggccgcccttcagccgtggtgctcaatctgctgcatgcatcaccttagccaatcctcacgtcaatcccactaggtagggattatcactgcagttatatagacaagggacctgtggctcagggaggttaagctacttgccagatctcatggctaagaagtggcagaaccaggattcatgcaatggtgtggccgtccttcaaatcctgtgaacctcccatgggaacctcccatgacatcttgtgtctcccctggatatacatccgtaccatgacgggttttcttttttcctggtgggaaagggcagctgggggtgagaatgctccagagagtggcagaatggagctatggacatgaaagtatttggatcgttgggaagtgcagaggtcagctccgcacacacttcctgggactttgcagtcaatggttactgaagttacttaatacccacttgtcccacgactggtgagtcccgcctattgcctgctgtcctgtggtgcagctgctgtttgtccatctccagggccaccaaagcccgtctggattgtgattcaaggtgtaagaggacatggaaaaagaactgatttgtgttgtatgagtttagtttaacttgattacaggaaactgttggtgggtgaatgtaggatttcattgcgtataaacatttcagagacaagtccctttcagctactttctacttgggaatacttgtgaggtttttcacctaaggcttccccgtaatgattttgtcctgatgattcattccttaattagtggtattttattgccgctttgccacagagctttcaaaaccatcacctcctcctcctcctctggaaaacgtgcacagactttgcccacatttaatcatgccatccccaccctttctagtctttcttcaaacttctaccagttcctgtgtttctgagaggagcccaagtcaaacactatgagataaacatcaagagcttaaaatgaatgcatgttcaaaaaatatgctggtctctgattccaaacatggctactgctaacccattgaagacccatcaaagacctgactattctgaattgttttaatagcagtgaggggtgagtcgatgtctcaggagaggatggcccagacctaggtaatgtgtgtcccgtcccccgacccagtgagcacgtgtgtgcatctgtgggtgtgtgcgtgtgtgggtgtgtgtaggtgtgtgtgtgtgggtgtgtgcgtatgtgggggtgtgtgtgggtgtgtgcatgtctgggtgtgtgggtgtgtatgtgtgcgtgcgcgtgtgggggtgtgtgcccgtgggtgtgtgtgggcgtgtgcatgtgtggatgtgtggcaccatgtgtgtgggtgtgcgtgggtgtgttcctgtgtgggtgtgtgggtgtgtgtgcacgtgtgtgggtgtgtgctgtgcgtgtgggtgtgtgggtgtgtgcatgtttggcaccgtgtgtgtgggtgtgcgtgtgtgtgtgtgggtgtgtgcatgtgtgagtatgtgcatgtgtgtgcaagcgtctggcacacggtgtttttgactggactgaggttgtggtaccagagtccagaagacagacagttgaagttgtgtcgtggagggacactgacatgaaatctggcaagtcatgtccaaaccaggtcactaatcaattgtgagcagagagcagtgagcagagggcagcagctatgtgcagagccagaggccggggttcgaatgcacaggagccacgtggacactgctgcaggctgcccgggcacccagccgcagattacctgtgttacctcatgcctttttttttttttttgagactgagtctcactctgtcgcccaggctggagtgcaggggcgcgatctcggctcactgcaagctccgcctcccgggttcacgccattctcctgcctcagcctcccgagcagctgggactacaggcgcccgccaccacacccggctaattttttgtatttttagtagagacggggtttccccatgttggccaggatggtctccatctcctgacctcgtgatccgcccgcctcggcctcccaaagtgctgggatcacaggcgtgagccaccgcgcccggacccattgcctcatttcttcctccagccgcctgtgggtggggactgttcccgctgcagtctcctgggtgagagatgagggagctgctggtgagaggcggttgccccatcacctaagctcgtgaccaggggagggggaaaagcatcactgctcaggcaggagcccccatgcctcctgcttggggttcacttaaaggcacggcttagagagattctatcgaccaaaggatggaaagagccacggagaaagtatctttccggtttttgctttcctctgtgttccgtttccttcccatttacacaggtgcctttagcacgtagatattcacagctctctagagtcaccaactcctcgaatatccctggggtcctggcagaaagcggatggcgcgctgcgtctaacggagagtttttggaaaggactgtttacaaaagctgtcgcaggtgcaggcaagccgtggtgcgcagtgctcctgccagccgctggggaggcctgagggcaggaggggaagccacgaccaccaccccgagagggaggacccgggagcatcagctgagaggcatcatgggacaggagccaggaggacaagtgccctgtcctctcccatctccttctgcgctctccaagggctgagcccatcctgaagccagaaggaagcctgtcgaggcagcttgcatccgtctgcctcctggcgcagagcagagtagagagattgaagagtggacctggacgggcaagtgttcatagaaggcgcacagtacgagcatctcatgaaaacagtgggccctgctgctcagaaaaatgcccaaacacaccaaatgtggcatatgttttcaggggatccatataccccttttagccagtctctggaccagactgtagagtaagagtctgatttagatcgatgggaatgtttgtttgtttgtttgtttgtttgtttccctcctgataaaaaatcctggggtttgtgctctcctttaagtctgtaacagctgagtgaacaaatggcctgcacgccggctcccaggtcagatgtccagcaagcagacgcttcttttcttgtttctctgtctcaagggagcaagtaagtccagaagaagaaaggatctggtgaaggaggctgcaacccgaagttattttaagagagtgttgaaaatgagggctatctaaagcagaatgtgtggctgggatttacaaggtaaatcaaagcagctgtaggaaggaaagaaaagattttcaatgacaaacgttttcctttttacttgttcttttgaaagaaaggggaatgtgtgggcagacagttgtgaggatcttgacttaaatacttgactgccttttcacatgcatgctttaaaaactctctggttccggctgggcgtggtggctcacgcctgtaatcccagcactttaggaggccaaagcaggtggatcacttcaggtcaggagttcgagaccagcctggccaacatggtgaaaccctgtctccactaaaaatacaaaaattagcagggcgtggtggtgagtgcctgtaatcccagctacttgggaggctgcggcacgagaattgcttgaacccaggggacagaggttgccgtgagctgagatggcgccaccgcactccagcctgggcaacagactccatctcaaaaagaaagacaaaccaacaaaaagaaaaacacaaaaactttctggtttcttaaatgaatgacactcacttcgagaagaaggcccgtctaacctcagccttatttttgcattcagctagataataaagtcactcaaggtcttgggtccaaccagatgctaaaaatggctgtttttgctcaacactataagattggaagtcagggagctttggactttggacatttggaactgaggattcacctagaacatcaacgtttttgaacattccataataaaataaatcctgttaactcttaggcatttatacccccaatgtggtgggataaaaggatgaggaaaaaagtggcaccaagatgatgcgagctctttattctgtgtttcggtctcatcccattcagatgcttcttcatggaacatttccaggcagtggtgcctgatattcttcatttcttgaaaattctggttttgttgccctgagagtttgagatgaaaatctggttcctggagaaaagggtcttcttctatcagtgaagcccgtcagtgtttggttctggagtgactgcaaacaaaaagagccctccaagtctcagctcttcccctctctgctggtagatggaaatctctggatctgaattcctaatgggccccaccagtctgatattttaattagtctggtttaaacatggttggaggccgggcgcggtggctcatgcctgtaatctcagcactttgggaggctgaggtgggcggatcacttgaggtcaggagtttgagaccagcctggccaacatggtgaaaccccatctctactaaaaatacaaaaattagttggccatggcggtgtgtgcctgtaatcccagctactagggaggctgaggcaggagaatcacttgaacccaggaggtggaggttgcagtgagctgagatcttgccactgcattccagcctgggcaacagagtcataaaaaaaaaaagtgggggttggggggttggcagtggccttcacacacagcagtctctgcctttaataatggtttaaatcatgtgttagatctaggccctttggtgagagccaggttgaacacccctgaagcatttgctctttgatctatggcctcctattcctttgaactttcccagaaagcagggtgggggtggggatggggaacactaacccagaattctttaaatttctttctaatgatttggaatgatcagaaacttttaaaccaacttcatttccaccttccagccatgcttatccatcgtaagactatttttatcttccataagaacccattctccagtgactcttagatggaaaacacaacactacagagttaccataaaccacttttccttaattgctgacatggaaccagacagaggggggtcattggtttggagaaggagagggagggagaatatctacgccctctctgtccccttcccagacacctcattgcctctgaggattctcttcccttcactctcatcacaaaagaggtaattaccttatttcaggcatcctttttatagagcaggcagcagcctgtcacggtagtagcatttcactcttccaagaatggaaccattgcacaatgtcccaggagtcatttgtgatttttatgagaacctgaagaggttaaagaaaagaacagaaaaataagaaagcctttgctgagaagaagggagctgttagccaaaagagggaatttgggctgagaaattattgtctgaaatacttacatcttagagagagagagagagagagagaggtgagggaggggctttgttattgaattgagtgacatttctctttattataaagttataacgtccggcagtagaactgccagtaaaactcgatctggagtgttttctttccccctcgctatgctcttttagcagtttgcatctggactgttaaattaagggttcttgcatgggaaatacttcttattccttcagcaagtgaaactacttgctaaagtaattatttttaaatgcaaatatatatacacacataccttgtgtgtatgtatttttaaatatttacacacaatatatattcatgtatatgtatgtatgttgtatttttgtggttttgtgttttaacatcagctgcggtagaaagagaagggtggctctgctaagagtccctcctcaactggcctctggctgcaacgtaaatgacctcccttgttccctaccagcatggctggagcaaaaacgccagagtctcacgtacaaacattacctggagtcttcctactgcactcctgcactgtggcatccagagaaacagcgtcacttggggagaatgtcatgcactcctgcactgtggcatccagagaaacagcgtcactcaggggagaatgtcaggcagggatgagctgccttgacttgaaatggtcttgcctctcatctcaattaaaatcaagccattaactggctttaatgtagagattttgtggttcagttttcttcagtggtatccattataaaaaaagatgggggttataggtagcagaactgattggcatagttgtcaggcatatagtatgtattattaatatttaatatgtattattaatgttccctacctatagtgagagctatcctggcttaatcagttatccttcactccaggacgaaaccatgctttctgtggttacctgaattccaggtggggctaagcacagctaagagtatctggtagcctcttcaagtggcttttgtatcacccaaaccttttaaaaactgccacacaaactgataaaaacgtatacttctgtctatccttgattgaatgtaattgtcactatttattttaaagaaatggacaacttagagccctattgcaacacatcccaaacccagctcacttaaaccattaatcaaaacatttttcctccctacctgtggtctgtaaggaggatacaatctagtctctgattgcacaattaaacaggtgcagaaagcagtctatggattcatgccaaatgagtggtactggaagggaattctatgggagttcaaagaaaccggaggtcacagtagatcagagttggttggcgggagtctcgggggagaaatggggtttgacgtaggccttgaaagaaccgataggattcagacaaacctgagtaatgggagggtgttccgagccacacacactgattgttcagtttggtttgctcagctagaggacgtgttgggaagatgggtctgattggaggtgacgttgacacccagacttagattctaagggcagggggagttccctgaaggattttaagtgccaggggcctggtagtgctcgtgtgttaggcagaagggaggcgaactaggctgtcacaatcatctagattggagttactgagaatctggatcgggtggacatgaaaagaaagcagtggattcaagttacaaaggaagaattggcaaggggtggcaaaacagtcactgcttggaaaaaccatttttctgaagcataatgccactttgtttttgtttttgtttttgagatggagtctcactctgtcgcccaggctggagtgcagtggtgcgatctcggctcactgcaagctccgcctcccgggttcacgccattctcctgcctcagcctcccgagtagctgggaccacaggcacccgccaccacgcccggctaattttttgtatttttagtagagacagggtttcaccgagttagccaggatggtctccatctcctgaccttgtgatctgcccgcctcggcctcccaaagtgctgggattacaggcgtgagccaccacgcccggccaccactttgacccctgtctttgctctgtgtctcctgaaggacaagaaggccatcgtgctaggcttcggaattccctgcctattcgtgcataatttgaaatcatctctatgtagctttcagatgctcatttccttctggactccctagtacaatttcatcaatttcatattctctctctctctcctctcataggtatatagtatatattttacttgatgactgactcaagaattttcagatgggttctgatcttgtttagctggaagcattttctagagagccaaagccattgttattttggcttctacatttattgtcgtatattcaagcagaacagtgtaaaaatgattaccaaagttgagcctattatttagattttgatagtatgtgtgtgtgtgtgtgtatatatatatatatttgagaaggagttttgccctgtcacctagactggagtacagtggcaccatctcggctcactgcaacctccacctcccaggttcgtgcagttctcctgccttggcctcccgagtagctgggattacaggcatgcaccaccacgcccagctaatttttattgtatttatagtagagacggggtttcatcatgtcggccaggctggtcttgaactcctgacctcaggtgatccacccacctcggcctcccaaagtgctgggattacaggtgtgagctaccacacctggcctgatagttatgtttttaactctagatgactaaaagacacctataaagatatagaagttaagacaaaagtcacaattatgttgacaactgctgttacagtgttttcaatatatttatccaatagaaaagttttattttactgcacaataatatgttctattaaattaataaaaacgtactcatgagtgacttcttgtcatacagatctctatatctcttagagctgtatgtcggcgttttctctctggatatataatatacatattaatcaattcattcattgagcctgtgcttggcatgattccaggtgcttcagtataatagagcaataaagacaagccccctgctctcttagatcttacttttttttttttttgaaatggaattttgctcttgtctcccaggctggagtgcaatggcacgatctcggctcactgcaacctccacctcccgggttcaagtgattctcctgcctcagcctcccgagtagctgagattacaggcgcccgccaccacacccagctagtttttgtatttttagtagagatggggtttcaccatgttggccaggctggtctcaagctcctgacctcagatgatccgcccacctcggcttctcaaagtgctgggattacaggcgtgagccactgcgcccagtcagatcttacattctgatagagggatatagacaataaacaagccagaaaatacctgccagtcaaaaagctgtgatgggaaccagccaggcaaagatctagagggagagcaccaggcctgtctccacttatgtgagacgtacagaaacacacagcgccttgcccgtgggaggttctcaccacgtatttattgaggaataaatgagtgaatggatgtattcattggcctgcttgtaaaaccttcaccagtggactcttggcttttagaactttattacaggttgagtaatatctgaaatatcccttattcagaacacttgaaaccagaggtgtcttggattttgaattttggggggtttggaaatatttctactgtacttatatttatcaagtgagcaccctaaaatgaaaatctgaagtcctgaatgctgcagtgagcattctctttgagcatcatgctggtgcttaaaaagttttggattctggagcattttgggttagggatcttcaaccggtatgctaacaatagtgatcttatgtagtattttccctccaaagagatttgagagagaaataagtggctgccgtggttggccgtctttctctggctcacttcaccttgttgccctcggataactccagtgaactccttcttacttttcaaggccatggctcttccaagcaacctccctgagccccttgggctgggtcaggagggttccccaggcctgcatggacctacaatgtgctactgaaatgatcatttatgtgtctgtctctttctctaaacagtgggctcccccagactgggcacaaagttatttacctaatgtagccaagaggtaggtgtgcaagaattgttttctgttgagatgaaaatcaccaagcctggtcatttgctttctgtgtagacagcagtgtgttgttcacttaggactctgctctctgtctcgtgcaacttaccctttatttagggaaaatgaacaatctgtaaacaataagagaacactggcaaatcaatacagtcaagacctgtgggaaaatgtagaggtgtcaagagtaagagaataagctgagggagcaggtgtggatcaccatggtctcctttgacttgctcaataaagaccctctgaccaaaggttagctgcaaacgcctttgttttggagggctagtatgcagtggtttcgtgatgtgtcttttatatggtctcatggttttcaatttcttaattgatgtttctgatttacctgaaagctttaaatgttcatgatcttggcttggtacacattagacattaaggtttacaaccgatgcctgtcattgccatttgaatgtgttggtgacattcctggtgtggcaagctaggcgagtgtgcccccatcgacaaaagaggctgaattctatattctgcactatatggactgcctttctctttcactcacttgctttttaaatgacacaattcatcccattcttaatgggggttgggggagaaaggaagaaggaaacgaaagcaagcaaaagaaccactcagtgcccgcaactgttattatgatcttggtatatagctctaaatactttcaaaaatatacttgaaatactttcataggttttacaacaaataggattatacaaccaattttatcacagtgaatttccaagtcaataactgcttttcagactatgttccaaggaggggccggggttgcccagctcaagagaacaggaatccctgcaaagggccaggggcccgtcagtggctcctcctcagtgcagctctgctctctcggtttttttattgatacataatagaggtacatattttgggggtgcatgtgataatttaatacgttcatatcattgtaaagatccaattggtgtcattgggatacccattaccttaaatatttcccctttctttatgctagaaacatttgagttcttctgttctagctattttgaaatatacaatagattattgtaaactgtagtcacctactgatctgtcaaacagtaggtccttttttttttttttttgagatggagtctcgccctgtcacccagtctggagtgcagtggcatgatctcagctcactgcaacctctgcctcccgggttcaagtcattctcctgcctcagcctcccgagtggctgggactacaggtgcccgccaccacatctggctaattttttgtatttttagtagagatggggtttcaccacattagccaagatggtcttgatctcctgacctcgtgatccacctgcctcagcctcccaaagtgctgggattacaggcgtgagccactgctcctggcttttttttgttgttgtttttttttttttggagtctcactctgtcgcctgggctggagtgcaatggtgcgatcttggctcactgcaacctccacctccctggttccagtgattctcctgcctcagcctcccgagtagctggaattacaggcatgcgccatcatgcctggcttattttttgcatttttagtagagatggggtttcaccatgttggccaggctggtcttgaactcctgacttcaggtgatccgcctgccttggcctcccaaagtgctgggattacagacgtgagccaccgcacgcagcctcaaacactgggtcttatttcttctagcacactgtatacttgtacccactaaacaacttctcttcgtctcccatccccgctgcccatcccagcctctggtaaccacccatctactctctgtcttcaccaactccacttgtttagttcccaaatatgagtgagaacgtgtgatatttgtctttctgtgcctggttcatttcacttcccataatgacctctagttccatgcatgttgtacagctcttctctcattggaatatattttgtaaaacaaacaaaaaaaaattgggggtatgaaaggttttcactgctcatataaatgacaacttgtaaactactgtgaatagcaatattttcattgagtagagtgctaccaatatgcccattcagaatgaaaaactctgacaaacagctctgtccgtatatccttatcactcactgacaatcttttgattggcactggagcacccatctgctgggttttgtggagactgtggccatctctgccttttagactgagctgctcagacagttgacccaacaccggctgcctccttgccactgaatcggaatgaggtcatacttgtacatgcttcttggaaggttttcaggcctcagctctactgagcgaagacttggttgagtaacaagtgaggaggaaactgtagggttccattgtttacaatggggacagcctgcggcaccactagacattctgaggcgggtcctggttgggggtcagaaggtcattggataggcgggaaaaaaaatcattgcaaggttatgattgcaccagtgcattccagcctgggcgacagagccagactccatctcttacaaataaatcagaggaatgggagaaaatatttacaaatcatgcatttgatatttctccaatcatataccggtggccaataagcacacgaaaagatgcttaacatcattagtcattaggaaaatgcaaataaaaaccacaatgagatgccacttcaaaccgtctgggatgactataatcaaaaagacagatcgtgcattgggggcattttgagcattggtgaggatgtggagaagctggaacagtctatacgttgtttgtgggaatgtaaaacagggcagccgctgtggcacagtctggctgttcctcaaaagcttaaacacagagttaccaaatgatctaacaattccattcttagggatatacccaagagaactgaaaacatacatccacacaaacattagtacacgaatgttcatggcagcgttagtcaaaatagccaaaatggaggaagtaacccaaaggtctatccctgatgcatgaataaacaatgtggtgtatttgcacaatggaaagttattcgccacaaaaaggaataaagtgctgatgcatgctgccatgtggatggaccttgtaaacgttctggtagctgaaataagccagatacaaaaggccacatatagtaaactgcgtttatatgaaatgtccaaaataggcaaaactatagagacagaaaatacatttgtggttgcctagaactgggggtgttgagtgagacgaggagtgagtgttaaagggtgtgagtgaggaagatattccgtgttccatgatgattacatcattacatgcatagtgattgcacaactctgtgaatatatgaaaaatcacttagctgtatacttatggtgagctttatgttatgtgaattttatctcaatattaattttaaaatccaatgaagggcaaatttatattgtttttggcttttaagaaactgtcttaaaagacacatttatttatttatttatttatttatttatttacttacttacttacttacttacttgagacagggtcttgctctgtcacccaggctgaagtgcagtggcgtgaccttggctcactgcagccttgacctcccgggctcaagtgatgctcacacctcagcctcccgagtagttgagaccacagacacatgccatcatgcccagcgattttttgtagacatggggtttcaccatgttgcccaggctggtctgaactcttgggctcaagtgatccgcctgccttagcctcccaaagtgctgggattacagacgagagccaccgcacctggccaccccttttatactttgttaatggagaagtaaataaacagccagggtgtaaacaatacatgcacccccatagttcaaagggacaatggagcatatgtgttgatgtgtctgagaaaaacagaaaaaatgcttgtccctggaatgatggaaagaattgttacaccttgagaggagaggtcaagggtggaagtctgaaacaggtgtgggagatgatatttctaagagtgagccagtacgtttctggcaaaataaagactttagcaggctactagtttgtaaaaattaaactgcaaaactggagctggtttcacccttattttttaattatgtgggattagtcatttgtgcttgatgctccctcttagctcagccccatttctcttttctaaataaaaaacacttggttctaaatcctggcttagaaagcatatttttgaagctcaagacagaaaattcatttgtttgtgcattcagcaaatacttttcaagcatgcactgtgtgccgggcactgtcccaggcacctgagacacactggggaaccaagacgaagattcctgccttcaggcagcttagatcctggtgggggtgggggataggaaggggcagagacagatcatccaccacaaacacagtaggttagtcaatcctgtggcagattggaaggtgataaatgctatggagaaaaaagaacaaggtagcgcaggtacggaagtggaatggtgcaggtggcatgagtagccagggtccataacatggtgagatttgggcagaggcatagaggaagtgggggagctgaaccaagcaggtgtctggatatctctgagggaaaagcattcccagcagagggaacagcaaggttaaaggtttgaagggagagcgggcctgtcatgttcaaggaacagcaaggagtccaggttggctggaaaagagaccgaatggtagcagagcaagtcggggaagtctcaggagggtcagagtctatagggcctaggaggccattgtaagtacttggcctttttaacaatttaaatgtaattcatataccataatatttgcccctttgaggcatataatttactggtttttagtctagtcatcatactgtgcaagcagaacattttcttcaccccaaaaataaactttataccataaacacacacccacacacgtccctcttccagccgctggcacccactcatcaacattctggctctacggacttgcctattctggacatttcatattaatggaatcatacaatacgtgaacttctgtgtctgctttctttcacgtcacataatggtttcaaagtccatccatgttgtaacaaacattattagcacctattcctttctgtgtctgactagtattccatggtatggatagaccagtttttggtgatgcattcatcagtggatggacatctgggttttcccacgtttggctgttgtgagtgatgctgtgatgaacgttcatatccacgtttctgtgggggtgtgtttttctttcttgggtgtctgccgaggagtggaaggacttgagcattgcttttctcctgtgtgaaatgggaaccatcgcagtgttttcaccaggatctgactcgcatttttttttttttttgagacggagtcttgctctgtcgcccaggctggagtgcggtggcgcgatctcggctcactgcaagctccgcctcccgggttcacgccattctcctgcctcagcctcccgagtagctgggactacaccacgtctggctaattttttatatttgtagtacagatggggtttcaccgtgttagccaggatggtctcgatctcctgacttgtggtccacccgtatcggcctcccaaagtgctgggatgacaggcgtgagccaccgcgcccggccctgacttgcattttaaaagggtcgctttggctgcctgttgggtatcgactgtgggtgaacagtgagtagcaggaaggaaaccaggcaggatgtgatggcagcgacgtgggtgagagtggtgatggatcagaccagggtgggagcagtgaaggggttgacagattctggatgtattttgaagatagccaataaaattcttgattactgtgagagaaagtaaggttgtgagaatcagcccgaggattttggcataacctgttggaaagatggagctgccattaaatgagatggggaggggtcctgagggatcaggagcgcagctgaatgcaccgaggtggagatgcctactagacatcaagaggagacgtccagcagagggctggatggatgagtctggaattcaggaagcagcctgggctgcagatataaatttgggaatcattggcatctagatggcatttagaaccctgtaactgagtaagatcactaaggctcccatttattcaaaggacaaaacaacataaatgttgacagagagtaataatcttttctatttattgagttccaacagtgagctcctgttatcactaaaaacagacatcgcagataagcttctccagaaatacatatttcaacctggttgagctataggcacccagggtatatctacagaagccaggtattaatatcttagaggcatatgcatcaatatcgtgtgaagtcttttttgttagctcttttctgattatgctttcagagtttttttgttgttgttgttatatttttgttctcccatgtataccttggtttgtgatcagtgtgtaaaggaggaggaatggttgtttggttgagacatttgcaaatagtaagcagtcaccttacctaacttggctaatttgcattgtttccatacagagaatgtagtttgacagtcaaggatgatagaaagtcagaggatgatagaaaacaatcctttcttcatacagattaagaagaagaaatgaataatctaaagaaagaaataacaacaagagacagatgggatgctgactggtccagaaaccgtcaggtagcaacagttgcaaatctgagggagttcagcctggagaagaccaaggggagagagtagaaaggatactcaaatatttgaaaggacacaggcttcttttctgttgctctatatagaactaggattcgtggataaggattgcaaatagacaaatttccacttaaataagaaaaaactttcaaataattaaagctgcccggccaggtgcagtggctcacacttataatcccaacactttgggaggctgaggcaggtggatcgcttgagcccaggagtttaggaccagcctgggcaacatggcgtgaccctgtctctccaaacaaacaaacaaacaacaaacaaaaaactagcctagtgtggtagcatgcacctgtagtccgagctacttgggaggctgatgagggaggatcacttgagcctgggaagtcagggctgcagtgagccatgaccgtgccactgcactccagcctgagcaacaaagaccctgtctcgggggggaggaaagaaaaaaaactgccgaactacatgcagggtgggattgggcatggtacctgggccagcctgttggcataacatgtggaagcgggtgacccacagtcaggggtcagtctgagggactgccatactgggctagggcctctgagtgctctgccagcttaggggttccatgattctcagcagatttccagcaggtgtttgagggtttctgcattcagtgacataaacaggccctcgtgcttctgtgggttataggccagcttggtaccgtataaccagtacatcaagagttgaagtgttgcactaatgctttccaagagtcagagctggcagagtgaccgggtatacaggcagagtttgtactctttccttttagaaacacactctgctgtctgtacctgaattgttctcactctgtggaggacttgggattcttgatgttatttatcttatgtgttccaagtgctaagtagtttaatcctaatacttttaaaatgttaaaaaaaaaaaaaaaagagagagagaaatgtttaaagtttggatagaaacccttagaatcattaaatattctcagtgaaagggaccacagaggtcatctgggcccatttcctcattttatagaaaaggagtctgcaagatccagacagcagttcacccagattagttggttgattcaaactttcccttcctatttctctctacagtgttttatctacaattatattatatttaagatttggcaacaatgaccatatgagaagtccttgtaatatgccaggcactgtgctggccgtgcgttgtgcgtgcattttcctatttaaaatgccacctataagtgccatctttggaatatttgtcctttagaaagaagcatctgcttcaaaccaatggcagagacaaaatggcttttctcttatctttactactgtgtggatttctccataaacaagaactggcaaagggcctcataacagctctgtggccctctctgggctcagagaatgcccgtagccaccagcccagctggcaacaaatggttgcaggttctgtttccatgtttcagtcaatctgtctagagaacaatggaactcctgaaccattcccgtgctcaaatgtaacgtaaaaaggacaatataaaatatcaggcttctgtgtttgaactgctcccctggggaaaggagcatggtggttgggaactcagcattaaacaaggaaactcgatgtgtatccagcatcactgagtgctcaggtctgcagactgcagagagatgtaatgcttattcctgttcccacatctttgatctttttgcgtgaagctaatatttgagaattctttatttccctggagtgtcaaacctcctgtcaactcgccataaagacaaggaagagatttcctttttcaacaagtgaggacagatgtggccaagcgttgattattattgtaagagatgaatacaaatgttatcattactgagtgctaagctttgtttatttcttcagaattcccctagtgcctctgggctgggaatctcacccacagaccttgatcaatgtcccctggcactttgaacagtccttggttggacctgacagcacgctccagtcttacctttcactggtagcacagcagcgtctaaccgatagggactcttcttggctctgtgtgtacttttaccatcctagataatgaagaccagagccaaggaagagaaagataacaaacgagagagcatatttgattctaggagatttgactgaagatggagatggtcaggtaggcaattcaatggggaaagacacttattttttatttattgacttattttttgatacagagtcttgctctgtcacccaggctggagtgcagtggcacgatctcggctccctgcaacctctgcctcctgagttcaagccattctcctgcctcagccttcctagtagctgggactgcaggtgcgcaccaccatgcctggctaatttttgcatttttagtagacggggtttcaccatattgtccaaggtggtctcgaactcctgacctcgtgatcctcccgcctcagcctcccaaagtgctgggattacaggcatgagccaccatgcctggtcaagacactgatttttaagtaagaccttccaatgagtaatcctttataatcaacattagaactagacgagtattcagaaatgcatgttgttttatatgataacacaaaggactgaatacaaacatcattaaccaagctcttctgagagcttggggaaaaagctgcccgagggtaccctgctttgtgtgcatgtgatatgttccatctgcctgaaatgttcctttgaaataagaagcgagggcacagctgggtaggagagggttgggaaggggcccatggaggactcacctcactgatgtgctgtggaggttcgatgaatacattccccgcttccctcctacccagtgtggcctgatgatcacgactagtgttcctaccagtgaatggttcaccccgaggcaaatgcgttccctaaggaagatatgtgctgtgagtttccagttgtaagaagccagtggagacacccaggtagtctgtgttgttgaagcctcacgatctgggagggcggtgtgatgaatcccgggcagccacacacagtttccggcaataccacatttcatcaattccgtgttagaacattgagtccaagctgttggaaaaagcttccccttcaggtgtgaggaggcccaggcagcagatgccaggactcacactcctgggcatcatttattttggaagttggggaagcaggtgccggacaaagctctgggtcgtcttcttttgcatcccctccagatctcacagggtttcatgggtgccctgtgtttgatgttcagtgtggaatccaagagcctggtgaggagaagctgtctcagaaccagtcacaataaaaataatgatccacagttaacatgcatagagcatttgctttgtctcaaggcatgtgctgggtgcaccattttcatcctcacgggttctgctagtgtcctcatgcatagatgaggaaaacaaagcttagagaggtcaaaagagctgtccgaggtcacccagctggggttgcaatccaggtctgcctgaccccagagctccagctctgaacctctgtgcttcctgacctggcttcagtgcctgtgagtgtcacagtctcaccacagctggtgttaccatagctacttaacagctggtgttgggggagcggggaaagtgcagaaatgaagtttgcgttgttaacaagaaattttgctaattaattttggggggacacattgagcaagtccgcccaggtgcatgttcccacggtcccattccagtgggcagttgaatgcacacgtatgcatgaagggcgtgggtagtgaacttgtaacagcagaggaagcagaaggttaaaaggagaagctaaatacacctcagtgctggaacgttcattttgcagatttttgtcaggtttggcagagaaacctccaagctctaatcttacagggcgactacttgggaatcaatcgggaagcatatttcctgttactttagtgtagcgaaggcttctcctcgttcttttctactcttagtaatgtattagtaaaatgtgtttatgaaaatctgagtttcctcattccacctttatgtttttccttatgtctttataaaatctgtaagttagtttcctcattccacatttatgtttttcctcattctaatgccctctcttgaattgttagttctttgctttaatgacgctttgttaggcctgggctgatcccacgccatttttttatttcttctggtttgatttctgcttacacctcaaagatgtttaccttcatatcttctctttccctttacctgtgacctctctgccttgcctctcttaataagtgttaataatgctgggttacactttaactcactttgggcagtattctaaatcttaatctcttcaaaggaagtgctaatgaaatgtcccaccattatgtatctgtgttctcttacaaatgcagatgaagagccattcaatggagccacataactgcctttcccatcaagccttgaactgcaagtaaaggggcctgattgtgaggagtcagactcaccatctaggtcgcctgacagaggcccctcctaaccctgtccctggacactgtaacttctctaagacatttgatggtgaccaggcactccactcgtccatgtagtttctgggatggattcctctctggaatattagactgcctcacagattaaactgctaaaggaattttgcagcaaaatgaaatagattttggagcattgtttggagattggagatttggactttgttccaaattgcagatttggagattgttccaacaatttggagctgcttctcctccttcttctccttctccttcttctttcttctttcctcctcctccttctcctcttcctcttcttcttcttcttcttcatattattattattattattattattattcttttaattcttcaaaggagaagctcccaagagagtcgatttgtgtgagagggcctgtgactgggcccctgagagttgcttttttttgaattaactgggataacaaaagacaagcaggcatcttggtattttaagtgtgttttcccaatggaaatagaaataaacacaacactgaccaagtattcaacagagggatggctaaacaaactgtggggtatacatggaatagaatattattcagcaatgaaaaaggaatgtcattctgacacatgctacaacatggatgaaccttgaagacattctactaagaagccaggcacaaaaaggccaataatatataaatccacttaaataggggacctagaataggcaaattcatgcagacagaaatagtgattaccaggggatgtggggagggagaatgggtagttaatatttaatgggtacagagcttcagtttgggatatgaaaaagttgtggaacttgatagtggtgatggttgcaagacattgtgaatgcacttaatgccactgaattatacacttaaagatggttaaaatggtaagttttatgctatattcctagcatcattttttttttttttttgagacaaagtttcgctctgtcacccaggctggagtgcaatggcgtgatctcggctcactgcaacctccacctcccaggctcatgtgattctcctgccccagcctcccaagtacctgggattacaggcgcctgccaccactcctggctaacttttgtatttttagtagagacggggtttcgccatgttggccaggctggtctcagactcctgacctcaagtgatctgcccgcctcggcctcccagagtgctgggattacaggcgtgagccaccgtgcctggccttcaaaagtttttaaatgctgcatgtgaaggtaaccttaggagaaaactcttctgcttcttataaactggcgatgctgtgtagccgttttctgtgatcccagagcctgcagggcaaggctttcagagggcacacggtgccctttcacacgagtgatgctgacattttctccagagctgtgatgaataaataaatgaaggaaggagttaagattccttactactttgcatcttggtcaatagtcagtttgtcttctggttaaatatgagtatttttcgtggtggcaaccccgtcctccagctgctattcttacatatactggcatttacttaagtgagccctcttttcaaacaggacctgacctttcctaaaggagctttaaagaaatccatatttcctgattacaaatagaaaacagtgtgctttctcaagggttaatgtgggcaaagcaaagcaatgttggttctaatttaagcacatagtctttaggcttctttcgtaatagttcccttttgtccatttgggctgaaactgcttcagtaagcattttatgaaatcagtgagaaactccagaaaaaggcttctgcctctttttacgagggtcgtatttggagcaaaggagggaagaaaagcatctgtcaatttgataaatcattttcaggaaagaagaagtttcagcaaagtataagatagagttggcaatttaagggaggaaaaaaaaaagagaggagaccatcacatatagtgctatataaatggtttctatagagagcttttaaatatgtaaaataatttcatatatactatctcattagtgctcacggcaatccagtagttattatagagcttttaaatacgtaagataatttcatacatattatctcatttagtgctcacagcaatccagtaaagtagttattactttatgggtgaagaaatgaaggttcagctttattttatttcattatttattttacattttttattttaattaaatttttttttgggacgaggtctcgctctgtcacccaggctggagtgtagtagcaacaatcacagctcactgcagcctcggcctcccaggctcaagccatcctctcgcctcagtctcccaagtagctggaaccacaggcacatgccatcatgcctggctaacgtttccactttttgcagagacagggtctcgctgtgttgcccaggctgtggttcagctttaataagtggcttgctcaaggcctcacagcctgtaaaagaaactaaacttttgcagagcttccttcctgtccatagaactgtcccaaagtcggacgtcctgggcctgaggcacgggtttgtcacaaggggtggctcccaatagtaaaccttcatggctccctgtatgtgtggaatgagtctctaattgtggagaattgagaatggggggggtggttagagtcccttgaagtgttttgccagtgtagcttgtgtcgtgatacctctttgtgtcattgtaagtatgatcatgcccacatctttctgacatggtcttttgcatctgaatttgcagtttcacatttaacagatttaaacagattggtggcccatatgtatctaaaagagaaacatgtcatctccaggaccaactatatcatttgcagggctcagtgcaaaatgaaacagagggactctagctcaaaaatgattaaaagtgtcaatgtagcaacagcagagtaggcaaccaagcacagggcctacgtgctggccagtactctagcctggaaaagtgcaagaccttctgcaggtggaagcttcacagtgtgccttcagggtctgcttttgggctttctgccaatctggctacatacttaccctttgacacaatcaagggcaaagagttaaaggaaaggtagtcttgaggcctgaactctcttctaaccctattttttttcttcttttgagacagggtctcagtccatttgcccaggctggagtgcagtgacacaatctcagctcactgcagcctggacctcggctcaggtgattctcctacctacgcctcccgagtagctaggactacaggcacatgtcaccacatccagctaatttttttttttttttttgagacaagagtctcgctctgtctcatttgcatttgcatttcagacgcgccaggctggagtacagtggcgcgatatcggctcactgcaacctctgcctcccaggttcaagcaatcctcctgcctcagcctcctgagaagctgggattataggcgcctgccaccatgcccagctaattttgtatttttagtagagatgaggcttctccaagtcggccacgttggtctcgaacttctgacctcaggtgatccacccacctcagcctgccaaagtgctgggattacaggcatgagctgccacgcccggccatgtatctttttaagtacaggtggaggtctcattatgttgcacaggctggtttcaaactcctggactcaagccatctgcccatcttggcctcccaaagcactgagattaccagcgtgagccaccacactggccaacccagactttccactggtacactgtcttcattgctttgatagcaacttttaggctcccttagctttaaaaaagaatcctctaaccatatggggaaaaaaaaaaatcagcaacaactttgtacccacctgacattcggccagaatttttccaacagaacctaacaatagatatgctctctgaaaactctacccagatcgtacactccttgctgggtaggattgtttcagaggatatgaaggacaagggactgagccatgacacctgtcacttcccgtctgagcagttcctgaagaaacagcccccggggaatgaactaccccctctgcctcggggacaggcacctcctggtccacatccatccctggaattagatcggagccacagatgctatcactcctctgccgtggccccatcctcctctgtctggcttttgatgaactgaagactggggtccgggttgtaatggagacttagagttgagtgaagcattttagctttaagaagattattataattatctcaaggcactgaagggctgcttcatttgcatttcagacactaaaatcagagggcagatctttaagaggttaattttgtgagtgagtccttaataacagagggaccaagactcgattctttatgccttaggctaggtttgcagttggtagatgcaaaatatgctgataagattaaagctcctctagtgactcttaagcctcaggctcttttatttgcaaatgtcctgcaccctccatctcagagaactctctaggctccggtactctagaatcccttacagtggatttgcatggacaggaaagcgaattctcatctcttccaatcactgcaagacatggaacggatagtctggcggcacgtctggcagctgaacctcttcactgagaatctaggtaaaggccacttactgatcattataaatgcgctcatcataaagcagtccttctggatttctggcattttcttgaataaacttattgaaacaccctaaggagaactcagacatccttttcaaccctcaggagcggataagaggatgcagcttcatttgttaaattgcagttgcatgtcagttatgaataaacatggactggacttctgatgctaatgtaggaacgatatttgtacctcctggaagtaactcctatagctcgttttcttttaaaattatgcaatccacagtcaagtcctggggtacaagtctaagaggcgtcagccacacaagaggctaaagtgactttggggtagtctgcaagtatctcaacctgtcatttctccagacattcagatatagtacattttaaacacagcactgcctttttcttgaaatatttagtttcagtgttagctaagtttgtgattttttaatgcagaaaaaatgatttatttttaatttctgattcctcgtcgggctatgtatatgtaaagtccagggttatgagaaggcagaagtaaacttgctgggtagaaggcgtcatggtatcatgtgatgtggcttagattaatatgggccagaacactttctctttagacattgctaatgttattcttattcttctactattcacaataatagctaacatttactgagtgcttacagtgtgcttggaactttgctgagaactttataccaattatctgagttttacagaaacattttaaggtagatattgttaatatcccaatttgacagaaggaagaaacaggagttctgggcaggtaaggaacatgcccaagcattgctcactaataaatgactgagctgtgtgtaaacatagttctttccacgtccaaagcccatacttgtaaccactgcactgctgtttgtagatttgttcgactcctcagagcagtaagtcagtttcatcttacttgcctggcctctccattgagtattgaacttggcaggaaatagtgttgggagtgatttgtgatgtctgagataggtagatccagtacagaggaatgttgaaattagacttactagtcccatattagattcttctcagactatccacgagagacttctccatggacccaataccaaccaagcttctgtagaacattttttttttttttttttttttttgagacagagtcttgctctgtcaccaggctggagtgcagtggcgcgatctcggctcactgcaacctccgcctcccgggttcaagtgattctcctgcctcagcctcttgagtacctgggactacaggcgcacaccaccacgtccagctaattttttgtatttttactagagacagggtttcaccatgttggctgggatggtctcgatctcctgacctcgtgatccacccacctcagccacccaaagtgctggaattacaggcgtgagccaccgcacctggcctgtagaacacatttttattatgcagtccatgttcatatgtctagcctgtcagtgggttacttgttaataaaaagcagccgtttcatattagtgtctcattgaaagcagtgcctgttttccattcattctaccttggatttgttttcttcctcaatactgaattcttagaaaatgatatgtatgttgaaaaatacttgagaatacctgagaacggttctctgttgcatttattgctgtatgtgaacctgtctatcaagaatcccaggtgttttgtgatttccgtgtttgtgaaatacattaactctccttatggttggagaaatcaaaacagtgcaggtaaatggtgttttgaaatatctgtaatagtagcgaataagtcagagcctcacagtgcttcattttttaatggaaaatttgaacacatacccacctcttcagtactgaagaattttttcctgtttgattttgttgctgagattggagtttgtcccatgagaaatcactgaacagatttaattttgtttattcttttttttttaagacagcatatttgttctctaccaatatcatccaaagaatgaaatgaatttcaaccagagatgtaggacctaaaaaatttaggtcaaagcttacatataagtggctttgtcttgctggcatcagtattttcgtatttctcttctcaaaagaagataactttatatcaatatttcagaattccatgtagcccaccctactgactgcattgttgtctgttatgctgatacaaagatcttttgttttccttgcctgggatgttctgccatatctcagatggctggatggacacaggtggcctaaaattcctgtgccagattcagcatgatcctgacctaacttggcctggatcataaagtaaaccttggggaatgttcccgtagcctgagcgggaaacactggcctctgggagctccttatggaggagagaaaacgaggagctgtaaactggacaatggattaaaactctagtaaactggctggggtgcagtgtctcacgcctatcatctcagcacttcgggaggccgaggtgggtggatcaactgaggtcaggagctcgacaccagcctggccaacatagtgaaaccccatctctactaaaaatacaaaaattacccaggcgtggtggcgggtgcctgtaatcccagctactcagggggctgaggtgggagaaccacttgaacctgggaggtggaggttgcagtgagccaggatccttccactgcactctagcctgggcaacagagcagataatctcaaaagaaaaaaaaaaaatctggtaaactgaattccgggtcagatcttcagatcttacctcctgtgtaaccttggctaagttaccaaatttctcttcacctcagtttctctgactgtaaaatggagacacaagccagaaaatctttaagttcctgccaagttttaagagtttgaagcttccacgatactctgtgcccaggcccttcctgatgtctgcttttacagcgggacaagcagcaatgctgttgtactctctgcatcttggggcttgttcctctgaacccttgaagacaagggctgagccgcgtcagctctttcccaaaacacaatttaaacccttcggagtggtcagaaatgccactttgggaggcctccctgggttctctgggtgttttgttgaagcagtctcaggttctctaacgttctttttgttgaagatgatatctacaagctttataagctttcttctgatggggagagggaagaggttctcttaaatacagtgttcaactatcaaccgtcatctttagggagacccttcaataacctcagtttctctttgtgtataactagagctaataagagaatgtgggtaaattgggctaaaacaaagccaacattacagtagttcacatgatatttttaaaagaaaaacaaaggcggcacgccagactaaataaggctaccatggccaccgaagttttgcatcaatttgtgaccaaaggacatttttcaaactgacctaagccaatttggtatctgcagttatttttggtcaatatcattagcctcccatagttcaaagtaggtggggctataggttttctcctacaaaaccttgtttccaggtcatgttacaaaggaaataagtcttttatttttatttttatttttggagatggagtcttgctctgtcgcccaggctggagtgcagtggcgtgatcttggctcactgcaacctctgcctcccgggttcaagcgattctcctgcctcagcctcctgagtagctgggactacaggcgcgccccaccacatctggctaatttttatatttgtagtagagacggggtttcatcatgttggccaggatggtcttgatctcctgacctcgtcatccacctgcctcggcttcccaaagtgctgggattacaggtgtgaaccactgtgcctggacaggaaataagtcttaaaccaaattctgccatacttacaaacgtgtagcaagctgacaggaaaagtcctacaattcgttttgtaaacttgatgaaaagccacgcccctatccttttaggcaatcctacagcattttacataaagggtaccctagaggcaagtgcggttattgcactaatggcatgagccagataatcatccagttagtcaagcagagaaaagtgctcctggaatgacctgaacaatggaccaatcagttcaaatccctaatttgattaattgggcttgctggattttatacaagcaagaatgcctgctcaatatttctagccaatcactatatcttgaacataaccattttcaccaaagaaaaataatttctaactgccatgattccagttaaactctgccgttgaccagtaatagagatagccaaggcagcgtggcaacggcctttggagtgtaaccttctgatgagactctcagatgataacttggactggcctaggcactgagcaatcagaacagattctggcctcagctgatgctgtgcagaagcttcctactgagccagaattgtctcagagagctgccaaggcaaccaggtcttgagtggccaagatctgagatagaagggaactatagagagtggagaaggtgcttttctctccctgttcatctgctgagaaggcagcagaacttttggcagtataatgaggcttaaaagacaaaatttgggattcagacctgccaaggcggacaagacttaagagatcaagatcctgggaggaagagacagaaaagtgaactggatactccagtcgttgtcccctttgaagcatttgccaaatattagactgtatactgcaagagactaagcaaaaaaaccatttttagtggagttctcagtatcacagtgctaagtggaaaaaaaaaaatcacatggcggggtgcggtggcttatgcctgtaatcccagcactttgggaggccgaggtgggtggatcacctgaggtcaggagtttgagaccagccatcaccaacatggtgaaaccccgtctctactaaaaatacagaaacttagctgggcatggtggtgggagcctgtaatcccagatactcgggagactgaggcaggagaatcacttgaacctgggaggcggaggttacagtgagccaagattgtgccattgcactccaccctgggcaacaagaccaaaactctgtctcaaacaaacaaacaaacaaaaaacaatcacattcaaagcttagccaggagaaaaggcgctaggagataccccactgggatccttgaagaatcataacctaaaaatagatgtgaacctgaagtagacaagcgatacaaaatctcagtgagctcagtctgggattggtttagcttgatcactcccattcagctgcctaccagaggactgggcgaacgatcactgaagaaagatgggagtctctacctttctcataagttgtttcaatgaaaaatgatcaagcataccaagaaataagcctaaaagaaaaaaaataggcactggaaagatacccataatttactggcattatcagacataaatttcaaaatatctgtgattcatatgttcaggaagataaatgatacaataaagaatttcaccagaaaatgggaattcataaaaagaaactggggccaggcgtggtggctcacacctgtgtaatcacagcattttgggaggctgagttgggcagatgacttgatcccaggagtccaagaccagcctaggcaacacggtgaaactctgtctctataaaaaatacaaaaattagccaggcatggtggcgcacacctgtagtcccagctacttgggaggctgaggtgggaggatcacctgagcctgggaggtcaaggttgcagtgagtcaacttcacttcagcctgagtgacagagatcctgtctcacaaaagagaaaagaaaagaaaagaaataaagaaaagaaaagaaagaggaaattctggaacttaaaaaatgaaataatggatattaagaacacaacaagtggatctaatagcagattagatttagtacaagacagattcagtgaaatggaatgcaaatcagttgaaaatatccagagagatacatggagaacaaaaaggatcaaaatacagaaaagagcagaagagacatatggaacacatgtaacatataattgaaggcctggaagaggggaagagggaatgaggcagaagcaatatatttttctttttctttttagttgacacataataattgtacatatttgtaggtacatatttataggatacaaagtgatgattttggtataggtgtacaatgtgtactgatcaaatcatggtaatcagcatatctatcaactcaaacatttatcatgtctttgtgttgtggacattgaaaatcttttcttctagctttttgaaaacatacaataaatcatcattaaccatattcacctgagagtgctgcaggatgccagaactccttcctcctacatagctataatttggtctatagtttggtatccattaatgaacctctccccatccacctctccttcctacctttctcagcctctaacacctaaaattctacttcaaaatgtgatttaagaagccctggcttgccccaaccaggatatacacagagaaaaccacagctgggtacaatgtagtaaaactgttgaaaacaaaagccaaggagaaaaatgattaaagccgtgagaaaaaaattcattatttttaaaggagcaacactaagacagtaactcatttctcaacagaaacaatggatgccaagagacaatggaacgtcatattcatgggttgaaagaatgtaaccgtcaacctaaaagtttacaaacttaataaagatattcgtcaaacattgaagtgaaataaagacatttcaggacaaaaattgaaagaatccatcatcagtagaccaacactaaaagaaatactaaaaggaagtatacggatagaaagaaaatgatcccagaaatgcaggaaggaatgaaagctgacagaaagggtcaacatgtggttaagttcaaatgtattaagaatatgagatgtattgatggctggatagagggatggataaatatgtgataaagtaaatgtagaaaaaattttcacatgcagaaatgtggaaaaattaaagaatctggatgaggggcatatgggccattctatttttgtaaaatgttcagaaaataaatatagggcaaatataaatgaacattgaccatataaaagaacaaaaatggggttttgtgggcactaaaatatatgtagcattaaatgcatgacaaaaacaatacaaaaagtgaaagggggtaaagggagttaaagtgtaataaaatcataacatctggaagtattaaaactcagaattttaccagactataataggtcaaggacacataatgtaatctgtagagcaactagtaaaataatgcataaaagggaaaatagaatgaaaaatacttgattaatctaaaataattcaagaaagaagaggaaagagaacataaactaggtggactaatagaaaacaactgtaagatggtagctataaactcaagtatatccgtaattgagttacatgaaaattgactaaatactctaattaaaagataattattgttagactgtattttaaagacaacaaaatctaattaaatactgcttataagagacgcttcataaatgtaaggacaaaaagaagttgaagataaaagaatgaaaaaaagatataccttgtaaatgccaaccaatataagctggcatagttctaatataagagaaaatagacttttcaagaatcatcatgaagtcaggagttcaagaccagcctgaccaacatggagaaaccccatctctactaaaaatacaaaattagctgggtgtggtggcgcatgtctgtaatcgcaactactcgggaggttgaggcaggagaattgcttgaaccctgggggtggaggttgctgagagccgagattgcaccattgcactccagcctgggcaacaagggtgaaactccatctcaaaaaaaaaaaaaaagataagtatctttaatttatcattaatgttaaatagccaaaaatatacagaattaaaagaagaaaccagtctgtaatcatagaaacaacatgtctctctcaaaaactgatagaacaggcagacaaaaaatcagttaggagagaagatctgaatctctcaacaatgacacaattcatttccaagtacaactgggacattaaccaaaattgaccatatgttggctcataaagcaattcttgacaaatttcaaaggactaaattcattcagagtactttttttttgaccagagagaaattaagctgtaaatcaatgaccataaaaatagaaaatcaccaaatgtttagaaattaagcattctacttgtaaataaccaacaggttaaagaagaaatttcagtggatttcagacaatagtttgaaatgaaatgatgaaaattttacacgtcaagcgctaactaaccactcacccctgaagtgtgtattcctaaggtacttcaaatattaaataactactcctataatgtaaattaataactaacccacacattattatactatgtatactgaaggactgttatttatttatttattttaagacagaatcttgccctgttgcccaggctggagtgcaatggcgtgatctcagctcactgcaacctccgcctcctgggttcaagtgattctcctgcctcagcctcctgagtagctgggattacaggcatgtgccaccacacccagctaatttttatatctttagtagagacagggtttcaccttgttggccaggctggtctcaaactcctgacctcgtgatctgcctgccttggcctcccaaagtgctgagatttattctatcatattatcattcatctcaaactccatatgtaacttgcagttgatttttcaacattcaaacatcatttattattatccatcaaattgccatcttgttccatttccctgcatatctcctttctgtgtagaagtcttccttctgggagcaggacgaggtaagtgagatgagagcctgggctgtcacactttatattctaatatttttaacccaatttgctttagtgtggtcagagaagctggaaattgaatcagagacctcaggggcaactcaggtgataagtcagcctggatgtgaagtttatcagtcttggctccgtgtgtttaattagaagctagtggaatgttatcattgactccgccagcaaacatcttcactggagaggcagctgggttaaggaagaacatgctgaaaatagagcttatgaacatagctgaaaactgtttatccacagcaaccagcagaagtgaggggcgggagagagcccagcagttggcaatcagagcgtgcatataagcaaagggatcatttcttccaagctgtgtcagagggcactcaatcatgtatactgagctttcttcctgaaaagatagttcaaatctgtgtggattgtcaagttttcttcctctccataatatggtcattaatatttcacttcttttagccaggaactttcaataattcaacatctgctcttccaggctgcctgcaagaaaggccagtttccacccactgccctcctgggtttgtccttccaggtacagaatctgagaggtactggggaaaagaggaggcaacgaggctagtctctcactcctctctcttccctacctgtgtttcttggacgggttcacattcttcttgcatcagatagtaaatgcagtcaaggaactggtgaggaaaatgggaagtttttttgtgcatgtgttagatgggaagaggaaaattggcaagtgttctttaagaaaagcagacacagttacattcatgaggcaaccggttgccagactagtgtgactcctgaaggaacaacttggattgcctttttttttaaaatcagtttttatctagaccaaatctcttttatttcagtgatgtcaagcagctcatgttaccttcgcccaaagagaaagatgtatgggagcttcaaactcaggacaattctcaatgtccttagcgttgactcatattaaaaatgttaagagaacactagaataatagtgatgtgtgtgtgtgtgtgtctgtgtgtgtttgtggtttcctttcctggaaaccctttctaggattaacctaggttaatccaacataatgatagtctgaagaggttgaataaatcagcccagatacgcaggtgatttagccaaggctacatggtgagtctaggggcaaagccgaataagggtggagtccctaattcatagctaacctgcactgccatagtctatcggaagtgaggtagagattattatctgattttattattccgggacacgtaaacttggctgaggacacacagctcggaaccctagcccatagataaatagacaactttatagagtataatttgagtaagccaaaaagtttccacttacatatattctagacctccactttaaagtaatttgagggggacagagaggcaaagtgagcagcatttcttcagaaatcacgttgtctggaaatagctcagtagtgcgcatggcactccgttagccaattgctgtcctgggcctggagggccatagagctggacagaggccttgttttgtttggttcggtttgtgcttgtggtattcaggctggtaggtctgatggctggtaaagtgctaaagcaatcatgggtgcgaggtacacagtggggaatgtatcaaacggtcactttcctaagggagacattctcccccttctaggaatttgctgagggttgggctgagtggaagcgtttccttcctgcctgttctctgacttccaatgcgcactttgttttaggctggatagctacacatcatcaatgagattgcagacagtccctgtgcttgctaagaacggtggaaggttttaggactactgtgtcttacatattcattgtctaagcccccaagtgtacagcattcaaagctattccttccagctctgaaatttctttgggtgaaagctgtcgactttccttagaggaaaaagaaagccatttcatcagggcactgacctcattcctgtaagcttgactggctgagccctgggagtgacacctgtcccagtctttggctttagcaagtgattgatttgaagaaatggtattggtcatttaacccacaaactgattctgaaataagactcatttgtaataaatacatctcacatttgaggactgaattcttcaacacacattccaagttttgtcagttagaaaaaatacagtactttgtaaagtataaaatccataactctatataacccaaacaataggttgaaaactgggtttgttgtaagtaacgtattaataacacctggtgtaatacctgttaacatgctcggtgcctgaagcaaattggcaagcgtttcatctccttttgccaataacttgtcagaaactgactgagggttccttccaaactctcagaagaacatccaaggccaggcagcttatgtagctcttgaacttcaccagggcgagggctgggccccggccaactagagaagccacagctgaatcagaggaggaattccgaagagctgggcaggggcctcctgatggcgagatgctgaatgggataagaatgtgatgaattaattgatttgtatcttacgcaagagctgcagtgaggatggtgaaattcatttccttccataggtcctgcccctttctttgtaagtcagtcagcagcattgccagagctgcctaaaatgccacctccatcccctgacaatcaaagaggaatcttttcatgcaggctgagttctaatgacgaactcattaaaatcaagaccacttactatgcgtatgtgatgtgttataagcactttcagatgcatgattttaaacattctggccatcctgtgaggtcagtaccatattatccccatttcgtggacagaacagtcgtttagagaacttcagtaatttactcgaggcaatctggtgtgaaaagtttgagagaggacactgcaaccaggccacctgggtccagatcttggccttgccacttacgagctatgtgaccttgagaaaaggtcttaacttctttgtgtttcaatgtccttatctgtagaataaggataatagtgttgcggatgtcacagagtcgtaatgagggttaaataagttgatatatagacagctccgagaacctggcctggcatatggtaaggactagctacttatttgtggtggtgatttgtttttactctgtgagagatttgaacccagtttagtttgatgctagggtcagagttctttgtcatctgttcttaagaagccagtggaataaatatcttctttctcctacatttacaaagagatgataatcctgctttagaagagttatcatgcctgcagaggtatcatagagattagtttttatccgcagagcactttttaattggaggataattgctacactggactagtgtggtagtaggaattcatatcaaaattagactttgtgactgaaagtgtaaacaaatgcattcttgctaagactagccacatatttagaggcatatagcagtctgaaataattctattcctttgtcaacacacagacggaggaccgttgggccttttgctaaatttggctctgctgcacttccgtctttagaactaggcaattgcttcatcatgcctacattgtgctaccctgatattttggtacctactgcactgccgcacattcatgggacgccagctgtaccatctatataataatctgagaacttggccattcaccatccaaagttttcatacaaaccaatgaaggcggcgtgcacttcagatgagcaaacaccagacctgtagtataggtggacagataactagattttgcttttctgataaaaaaggaatcttgtctgttgttttagaactactttatatggacagtgagtgcagcatgatttcttccaactggagatttaatggagacctggatcaaacattacatactttgttacatctttttgagaatgagttggagtgaggggatgttatgttgaaaaagaagaggcaggctgggaagggtggctcacacctgtaatcccagcactttgggaggccgaggtgggcagatcatgaggtcaagagtttgagaccagcctaaccaacatggtgaaaccctgtctctactaaaaatacaaaaattagctgggtgtattggcgcacgcctgtaatcccagctactcgggaggctgaggcaggagaattgcttgaacccaggagggggaggttgcagtgagccgagatcctgccactgcactccaacctggcaacagagcgagcaagattctgtctcaaaaaaaaaaaaaaaaaaaaagaagaagaagaggcaacacttgtcttggcaaaccatgactagtttagactgcaagctcaatgaagatcaaaactaggttggtcttgttttgtttcaggcactctctgtatgtatttgttgaatgaatgaatgaaaataatagttatgattataatattatctaagtatgaagaacatgcctctggatcagtaaagacacataaaatggtaggagggttaaagaacatcagtgggtaccaactgttttgtcatgacagggggatatctctgaaaaatttctgtattaattggaaaagaagcttatggtgaacttttttttttttttttcgagatggagtttcgctcttgttgcccaggctggagtgcaatggcgcgatctcagctcatcgcaatctctgcctctcgggttcaagtgattctccttcctcagcctcccgagtagctgggattacagacatgcgccaccaccccggctaattttgtatttttagtagagacggggtttctccatgttggtcaggctggtcttgaactcccgacctcaggtgatctgcccgcctcggcctcccaaagtgctgggattacagcgtgagccaccgcacccggccatggtgaactctttttaaatgacacataaaatttcctgatttgtcttttaaaagttacatctagattttcatgtatcatttttcttataaggatagctaattaatatatagattttatgtatggattttcatatttcatgtatataacatgaattaaactgttatttgtatgaagtgccaagctccttttgggtagtacctaccaccctgtatataccacatgccaaatgagtttttaagatattggcatgtcccaaattcaccatttacattcttgaaagtacttcctttgttccatacagatctaactaaatattagaggtatctgaccttttattttttgaaaaaatgtttgatgttctgactatttgcaacaaaagagctctgttctcaaatgccctgtatggagagaatttctcggttcttttgagagggataaaaaacctctcttaagtctgtgagactaaagataaagggcatcccagcaccatgtatctgagggataatgactgtccgtatcggagagctgggcggtgatgggtgtgttggaagcaccggctggaccaatggacttggagctagaacttggttttgctctcggcgttgccgcagggtggctgtcttgccttatgcaggttttgattctcttctgtaaggatctggtagctattccaaagccaacccatctgtgctatgggatttgatgccacatgactccagctaccctggtaggcctttcccaggcgttggtcagagatatgatccaaaggctgtctgtagaagattgttctctcctgagtgttctgatgcagccagcacaagggtttcctaaggaaaggaacctggtcctgcttcggtcgttttcgtatcccctaggggctgctgaataaagtactagttcccaagctttctgtcatatcttctctgcacacttctggagtagagtgggtgagggcaaggccaggaggtcagtgccacagcgtgggaagagaggaggccctgggccctattctctctggggagctttacatcacccattgctctctccatctccccagggcccagatggctccattctagagcttctcctccaaccccttcccaccttccatcccaaacactttcctctctccttcttggtctctctctctctctttctctgcccttccttccttccctccttccctccctccctcccttcctctctttctccctccctccttccctccttccctccttccctccctcccttcatgttttcctttcttccttctttctttttctttttttttgatacagggtcttgctctgttacccaggctgaagtgccacccctgtgatgcctagtggtacaaacactgctcactgcagtcttgacctcctgggctcaagcaatcttcctgcttcagtagctgggactgcaggtccacaccaccactcccagctagttttttaatttttttgtgcagatagtgtctcactatgttgcccaggctggtctcgaactccttgcctcaagagtcctcccatcttggcctcctgaagtgctgggattacaggtgtgagccactgtgcccagcctctctgctctttcccttccttctcctcttagttaaaattgtagccgtggtcagaggtggctctgtctcctcgtagaaagcagggagcaagactacaaaagaaatggtaaaattttaacgaattttaaatgaataaatccctaatttcctatggaatgacaaactaaatgatggtttgtagttggaaaattaagcaataaaatacttttttattttttgagagagagtctcgctctgtcacccaggctggagtgcaatggcacactcttggctcactgcaacctccgcctcccgggttcaagcgattctcctggctcagcctcccaagtagttgggattacaggcacgtgccaccatgcctggctaatttttgtattttagtagagacggggtttcaccatgttggccaggctgttctcgaactcatgacctcaagtgatccgcctgccttggcctccaaaagtgctgggattacagacatgagccactgcgcctcgcctatttttttttttttaataagtctataataggtatacacagggcctgactattccagatagtgtcagctgtgtagttttcttattagcagacttgggatctatatttatagacaattgaagttttaaagatgtaaagaatttatttattcattcatttattcttttgagagggagtcttgctctgtcgcccaggctggagtgctgtggcacaatcttggctcattgcaacctctacttcccaggttcagtgattctcctgcctcagcctcccaagtagctgggtttacaggtgcctgcaaccacgccctgctgatttttgtatttgtagtagagacggggtttcaccgtgttggccaggctggtcttgaactcctgacctcaggtgatccagccacctcagcctcccaaagttctgggattataggtatgagccactgcggctcatacataaagcattatatacaattgtcattatatactgtaatgtaccttcattccttctgtctgaacaatgtggattttagaaataattaccaaatataaacactactaaaatgtgtagatttggtggtgcagcacatcaaggagcacaaattttacaaatttctttttaaccatctctgcgttgtattttcagaatacggatgattcattttaatcctggtgtctttaaatgattaaggattttcatacatgaggtatttcccacagggaaattctaaggtaatttgggtatgattcgtttagagtttttcattatttacaacaatttagtaaccattagactttcttccttgcatgtgaatacatacatatatttttacatcaagtatttccatcgaattttagctgcttatattttctttttaaccattacttggaatggtattttcctataagcggggaataaagaaactacttctgtctctcgggtatattaacagggacagtggggcctaatttcttatgtcccctcagttagcctttgtcacagacactcctgtgttttggggtcaggagggaagagatcattgcagactacagtcatggaatttgattcatttaactgaaaactttttattttactttacccatcttaagtcctcctgatagccctataaagtaataaattgtccaaaccccttcaggaaactattcttaattccatcatcatttatagttgcctatctgcccaataaaccagaatttagccttaaagccatcgctctcttaatctgtattatgatcttgtctttatatatgagttttgtttttcaaattagtggatggccttaggtaccattttgttattctgcttgtttgtgtcttctgaagacagtcacagcatcatagaatactacagattggaggggtctatgggatcatcagaaccagtgcttttcaaaaaaattttaactgcaaactccccatttgaagtgaatttttgtttgtttgttttgtgacaaagtttcactcttgttgcccaggctggagtgcagtggcacaatctcagcccactgcaacctccacctcctgggttcaagcaattctcctgcctcagcctcccaagtagctgggattacaaccatgtaattacactcggctaaatttttttgtatttattagagattggctttcaccatgttgaccaggctggtcttgaactcctgagctcaggtgatccacccacgtcggcctcccaaggtgctgggattacaggcgtgagccacggtgcccagcctgaagtgaaatcttataagaccctcagtattggtccagggagggtagacttcctcatacctcccaggaggcccgagggctccattgcctctaatttcctctagatgagagaactgacacctctagagataaaattagctgcccaacattttggtgagggaggaagagtccatttttgttgcttagaagcttcgaaatcagcagaggtcagtgtatgtggagattgctggtaataagtctggaaacagagcagaaggttgcaggttggaacctggcttccctggaagccaacactcaggtggagctgggcatgcaggatgtttactggaaatccacacccgtagaaaccaggaggatgcaggattgtaccaaggaaaaagtcaaactgccacacaggccaacaaagccttggccagccccacagggaagcgctggagcataaatggcccatcctcgtgtcctgtgttggacttgatggctgggcctttataccctcactgctatcagtctttggatgtgaaccaccttgggaagggcaggcccttggccttctgcagcattctgtggctttcttcagtggaagcaaatcctgaagaagctgtcagctggaagccaattgcccacagctggggcaacaagtcctcccttgaagcaagatctagaaggcacatctccatgtcccctccacatggccccaggattgctggtgaacatgagagacagtggagaggagagtcccgggaggcagccttcccagccaggccaccccaaacttctggttagggattcccagcttcacagcactacgtaagctgcttgccaacagatgttttgacaacatctgttgtcaaaggttgacaacaacctttggtccttgcgatggctttctcctgtgtttcaagatggattcctattggcatctttcatttccacctctgtttcaccaagtttagtgaccattttcatacattggggcttaatgtggtgcagtggaaagtgtagcagattgaatgtggaagatcgggttccagatctcgttcaggaagttagtagctgtgtgaccaagagcaagtcgttcagcttttctgagccatgattcctcaggtgtacacaccaagtgatgaaacactttaaaaactaagaaaacagtgtttgaaatgcccctcaagtgctggtgtttccccaaggatgttctagacccttcaccattccattcattcattcattcattcatctattcgatgattagtgtgatccctaacttttttattgttgttgttgagacggagtctcgctctgtcgcccaggctggagtgcagtggcgcgatctcggctcactgcaagctccgcctcctgggttcacaccattctcctgcctcagcctcccaagtagctgtgactactggcgcccgccaccacgcccggctaattttttgtatttctagtagagatggggtttcaccgtgttagccaggatggtctcgatctccttacctcgtgatcctcccgcctcaacctccccaagtgctgtgtgatccttaacttttaatctacagttcctcttttttttttaagccaagtagatgggtgattttgttttctgctaattattttggtatctttcattccacctctgtttcaccaaatttagtgaccgttttcatacattggggctaaatgtggtggtcgttctccagaagagtgagtgtaagttcgctcttactttgagcagcttatctctgtttaggcgatttctttgtcaccattaatggaagtgtgacacctttctgagtcccaaatgtatcggtttatcaaaaaccacatctgcaatgctgcaccttgtactgagttcacctcagtctggtactttctttgccttttgtcttgtttgcctccttgttagattagctccttaaaactttttcttttcattttccactaagtcataactctctagactaaatcctattaaagaaacatttaaagtgtttctttactgtgaagtgtatcatgcatgaaaatagtgtgtgaaatggaggtagatgttcagtttaaagaccaatagtagagcaaacgtctatataccaactcctcaggttaagaaatcctcttgtgatatatttatgcacgtggagtagctactttttccagaatttggggacatgtaatgatgactgagagatcatatagtctacataaaacagctcatcatcctagaatgagaaagagagaaaccagccaataaagaagggcagtgtgtataggtacttacaatgagaaatacaaacaagatgggattggagccgttctctatgtctgggagagttagaaaagtttccaagaggatgagacttttgaaaagtttccaagaggatgagactttttaagggatggtttgcctgaggaagatgagcgttccaggtaaagggaacagcatagcacgtgtagtgattcttctccctcctcattcccctctcaccattctgaccattcaccttcagtttcgtttccactctcctatcctccataaatgttggtgttcccataggtgttgcattaggatctcttctcacgtcattcaattttcatccattcacttgctcaatgtcaatgaagcaatgggtctccagaaactcctgcctgcagaactatctgtggagcttggtaaaatgcagatggtcccaccagctcaatcagaatctttggggtagggtccaggtatctttagtgcagatgactgggactccacatggagaaacacaggtgaacagggagggttggagagaccactcaggaatcagtcacaggtgaccttgtgcttcctgctaccatggctgcccctcccagcctgcctcacctgtgcctttctcccttctcccttcctgccttcagctcctctgttgcttcttcttccttaaacatcttcaccggttcctgtgctattacagagccccgtctgtgggtctcatgtctctgctccatgccacgccctcccttgggcatcatctgggctttggctgggtctgtggagggtcctgggctgcagtgccatgaacagtggagtggggcatgcgaagttgacagtcacactgaaagctcctgcctcgcctctctaccttcttctcttttgggggtttctttcctgaggcagggaaaaagaaacaggaacccagaccaaactgaggaaaacacgatcagagatgagatggggtcagaggcaaagggctgtttgttgggtttgcactttcattactgagagcattggaatagttttaaggcgtgcaaactgtgagactagacaatttcacttagaaaatgaaacgtgcatgcagatgttattctcatggggatatatatctgcatctgtttgtctacaagtgttcccttgcagagtcacagacatatacaaaacctgggttccatcagctttgtctgcacatacgtggctaaatgtgtacagggatgtacaattaaagattttaaacacttgattttgacagtatattttgcagctgctgtgccaagaaccctaagctactgtgggttaattggagttgtagcaagtatttctttctcggctgtctcttttagcagagcttctctctctctctctctctctctctctctctctctctcttcccctctctccctgtttcacccctccctgcctgcctgcctctgcccctccctccctccctccctctctctctctgagatagcagacaccagagtgaaactggtgcagcttcctttgagaagcgtgcttgcatgtgcggattggcaggattgtgtgagctcctctcccatccatgcactgttcttggagggaaatgcaatgttggagcaggggctgagctgcactgggaaggtggctgggagctcagtgaggccaggatcatggtttagccaaaggctggaatcacaagaatgtttcaccagggtctgctctgagagttctcagacccccatggattttagaattttccagcctttcctccttcaccttcgcacaattttactttctcctgagatggccccagatctgcaagagacatttgagagaagctatttattagcagacgtgaagaaatggattctgcacttgattatttagccatgacttatcaatgatgatggattggaaagcagtgtaagtaacgcagttatatatgttgctggagttaggtggtctgttttcttgctattttttttttactttaactttttcagtttccttttgagaaaagtaaaaataaaatgcataaaccatttcaaagaagttaggagggtccaggttgtgcaagctttcttcttgttcaatggacttgcagaatacctagttctatcagaagagacacacaaactaccgacatagaagctacaaacatcctccggaggatgggaatgaaatgggtaataaatgaagaaggtttctgaactgacagtcattgctataatcaggcttattcagagttgctaaaatatttgacattggctcatattagaatcaaagaactaaaatgtattctctttacaggatcataaaaatgaagttagcctgtggctttcagagcaggttctttctggctgcgtaaatgtgagggtttttgtttgtttgtttgtttgtttggttttgttttttaactaatgtcaaatgttgactatgtttcctgtccatttcaacttttcttgaggtcggacatctccctattctagagtacaatgtctggtcactcttgggttgcaggccactgtctagtggaaagctagtcattgctagtttataccagtcagagacttttccatctttctgtgtgagggcttcgtttaagcacttcaattcctaagtattcagggaggaaaaacaagtcacttgaagaccaaaatcagtttatttcacaagagaaaggaacggctatttaaaagatgaaaaattgaaatttaaaaatatgatctgccttttcttcaaaatctgaagtgaggttaattttgtgtaggaagagtaacataagctttcttgattaaaaagcagtatttagaggaggcttttaagatcataaatcacttaggtaaggtcatcaaaagagatggctgatattttttatggtcatttgcaactttttaaaaaaagtccatacggtaatgttaatgcagctatttctggcttcttaaaacttgcatagatttggaagtgggatttctaacaataagagtcgtgagtttttctgagctatcattgcctttctctgtctatcacattcatacctcaggcagagctactgtccctcccacctgtccaccctgcctgtttcccagcccccatccttctctctgagtcttggaacatcatgaaagactcttctgcagatttccttttaacataccctgcccagccttggacagagggagtactgtgaagcaacatgcagggctgccaattttggaaatgaatgagcttagttgattcctgaatattaaatcagttctgtgagcagtagaatgagatcatatcttacaaacctgacccaaagtgttcctaacaactttattaattggggtttaacatcatcaagggctgtagcactgggcacccgaggggatcagcctaaacccaaatgaaatccccaaactccactcggattcctgctggccaaatgcacctagggccacgccttctaaaatatgtcctttgttatcaagggaaatctgagacagaaaacacatgttggcagcatcatgtgagcgcctctctgcacataaagtggttgtatcacaaggggaaagctttcgatcttgtgccgttttgttttggtttcttgtttatgtggactctgttagactcctgcatctggaagaggcttgaagcagagtggaaaacctagagcaaaaatcatgccggggaaaggaaaatcattaaaaaacaatgactaaaaacagaataattttcttacccaaattccagttctcatccttgttttgggttccctgttaaagcagataccagttatagccttcctgggttaggggagacagacagtctttcatcatgcccctggattttgagcaaaggagaaagcttgctccagaaatagaaaagaaaaggcaaaaagaaaccatctttcgagtttctgctcactaacagaggaagcaaccccaccctcctccacaccctcctccacccccacagcttgtgcctctcaactgcccctggtggacagctccaacctgcacccccccccaaccccgccgccccctctagaatctcacgtgttttcgtggaggaccgagagtgctttttagcagtgaatgagcaaagagaccagatatgctgatacctgcacatggtctttgagagaggcagctgattgacatcgggaaaactgctgagcaattaaaaaaaaatactagagtcaaggtgaaagaaaggagagaaagagacagcgagagagacaggtgggttgtctctaaagtttcaagcaaagttctgtgaagcacctagcaggtcaaaactgataagggcagatggtgaagaaaagtcttaaactgatcagtgccttacacatggaacgaagctttcatttcggcccgatgttctgccagaaagctttgcttgagatccaccgccagtgttcttgctttgctcaacgatcccactatgctggtatgttctctctctggacagccgtctttctaacaacgggtgctgttctgaaaagctgggagcccaagaaatgttgtaaaaaccaagcgtggccttcagctgttggaccctgaggaacagcacctgcattagggccttgctcacgtttcttactagacaggttgccagctctcatttttgccctttgtctgagctaattggccttagtgttacatcggcccacatttttctccctgtaaactccattcctccctcatttcatctacactgcagagaactctcaagctcctggtgagttttgctgcaaagcctgtggcacgctgaaagaatgcaccccttccgaacctcatcttcccacttcttccactggagacactgcgggggagaaacatgtaaatatcgttaataacaatgcatcgcgtccttgaaaattgctgctaagagagtagattgtaagtgttctcaccataaaaaagtatgtaagataatacatatgttaattagctcagtctagctattccacaatgtgtacatattttaaaacaatgtgttgtacatgataaatatatacaacttccacttgtcagttaaaaaataaaaaataagtccaggcgcagtggctcacacctgtaatcccagcactttgggagtccgaggcgggcggatcacttgaggtcaggagttcaagactggcctagccaacatggcaaaaccccgtctctactaaaaatacaaaaatgttagccaggcatggtggcgggcgtctgtagtcccagctactcaggaggctgaggcaggagaatcgcttgaacccagaaggaagaagttgcagtgagccaagatcctccactgcattccagcctgggcgacagagtaagtgagactccatctcaaaaataataataataataataaaataaaaaatagacatttatataatgaaggtttttaaaaaagaaaattaaaataaatttggagaatgacctgtgaaaaatgcctctgcaagttttcctgaccagaggaaggacttggcttctctcctagacattttttctcgtatcttcctctaggagtcagtggaagagtggcgattaggtaacatctgaatgtagtagaacccagagctgttacctccatttgagctactgctggtcattgcttgacttctattctctccatcagtaaaatgcacgcgaagcttacctcattaggtttttcgagaattaaatgagataatgcatggtgcttagcttagcgtctggccatagccttgatgtcaatactgtcctcatgttctcctgtcagcggtaggtctgtctctcagacactttccaacagaggacccagatccttaatgacaggggacctgggaagacagggaggcaatgtcacagaatggaaagcgtgctcgagtagaagtcaagacctgggtgtttgagtcccagctctgtgcataaccatttgagtgatcttaagaaaatgatcaccccctcttccatgctacagccctagatgggttactccttactccaccactctcctcaccttgactcgtgccggtccctcagcacgacgggtcctcctcctggctggctcctttcttctctccttctatgagactcccctgatcccctgagcccgagggtcagggcttctcctctgccatcctatggcacctacatctctccacgcttaccgtgcagccatcactgtctgcctttcccactcgactgtcatctctgtcttaaagctctgccttcggtgtcaagaccgggcagcactcaatgaatgtttcccgaacggatacgtaaatgacagaaggaatggatgaagagtccctgccctgcctcaggtcttgagtgaagatgaaatgaaataatgtgtgtggaaggcttggatgagtagagtgctgtgcagttgccttcagttttaagttagtatgaggacaaagcattttttataccaatattttagttggtttctcagatactgagattcacacattttagtgaaacaaaacaatattctcttttataccatccttgcagtgtgggcccattatttgttgtagaagcaggccaggctttatgtgggctagaacctctgatggttgaaactgtgagcaacaaaacttttcattgcagaatgacaggtaagattctgaaagccagtggcatgggagggctcgctctgtaactcggcttgtcccagggtatgaatgagggagttcagatccctgcctgtgagggtggagaagggaaaatggtttctaaaagcagaggaggaaagagaaagaatcatcatggaggcagcatggtcagggaaggggcagagggtgttgcatctgacaaagctgggtttggacgatagcctcatacttgggtttctgttgtatctcatgagtcctctccctggaggagtatttggattctattctgcttctcccctgagtttgttttcacggtgggactatccaggactaaagagaatggcaccgtattgctctctctttctgaacccggacttgcaggccatatctggatttatcctttttatcagcagaatggtacatttcccatagcaatgcttgaactctggtccgtgatgaagcaagctcttccatggtgttagagtctgtttttccttcagaaaatgctatttgcagaacggcaacaacaaaacgtgtaacaggaattgtccgttcccatggccagtcctcatgtagagccacaagatggcgcagaggatgacatgaaatcatgtacgcgagcgtgatttgctactaggcagctctgtagggctgtatgtattgatatcacatgcgtctatatgaacgccccgctgcagctgcctttgctatacagtgaatacactgtgggtctattattcgcctcttcagatccagcccaggagttggtgcagactcatttttcactttcctttgaccctgggtgtctccacaaatgaaccacctgctgtgtcttggtgggggtggagatgtggggtgaagtaatgagcccgcaaggcctgtctgtgcctattggctgctctaaagggaagttgaggaatactgcaaagccacaaatctgagatgtcagctcataaatctgtaagctccttgcttaagtaatacgctccttgacggccaaaactgtcatttgcacattctcttcagctgaacacaaaagttccggttaccagactgtccctggatactggggactaaaagctggtgattggcggagtttgggggtggggagggggcgctgggctgattgccctggctgctccccacagctccacggctgctgctttcacccccacctgaccatggtcgcagtggggggctttctcttggtatttaattagtaagtgtaggcaaacatttgcattgtggcactgggataggaaaagagttgaacatgaatataaaaatggggatggggccgggtgtggtggctcacacctttaatcccagccgccaaggcgggcagatcacttgaggtcaggagttcgagaccagcctggtcaacatggcgaaaaccctacctctactaaaatacaaaaacattagccgggcgtggtgacacgtgccccagctagaggcagggaggctgaggcaggagaatcacttgaacccagaaggcggaggttgcagtgagccaagattacagcactgcactctagcctgggtgagagagtgagactctgtctcaaaaaaaaaaaaaaggaaatgggagaaatagtttccagcatttagcttttggcgacaatgactaaatcaatacaaatgttaatctctgttgcattatgcttttgaaactgtattggcagtttaggaaaaatccagtcaacagtttaatatgaaaatagagacctgtagaccaaatggagggcaggaagcagatatttgccacacaaacatttattgagcgcttgatgtattataggtgctgtgtaaagttttggagattcagaaatgaatcaaagagaggagtgaacatacaaattatcccaactataataccggtgataagccacaaggtagctctgctagcacggaacatatggaagagatgaataattctgcttcggagggaaggagtcatattagagttgggtctagaagaatgagcaggaggtggctgggaagggagggcgtttgggcagaggaattggcatgattctctgtgtatgcacaggaccatgaaagtgaatggtgtcatgtaatttttttttttttttttttttgagaatgagtctcactctatcgcgcaggccggagtgcagtggcacgatctcggctcactgcaacctccacctcctgggttcaagcaatcctctgcctcagtctcccaagtagctgggattacagacgcctgccacaacaatcggctaatttttgtatttttagtagagacgagggttcaccatcttggccaggctggtcttgaactcctgaccttgtgatccacctgcctcagcctcccaaaatgctgagattacaggcgtgagccaccgcacccagcaggtgtcatgtaattttattcatatttcctgatgactaagacaacgtatttttcagattctcaaaacaggcaatgattagtaatagatcaccttaaataggatgttataatggtgatgaagaccaatcacagctgcctggaaacagtagatcatgggtcaataatgggcccacacctgggttttgttactgagtcaacctacgctacttgttcatgttgtacctatttatcttgagctggtattagtatatccatttctaaaaatccttgcttgagaaggaaaaactattcaggagaaagaagaggagataaagtctaaacaacttgatttcacttgaaaagtcctaagtcgtcccttggaaactatctatagtaaaaagcatgggattttataccgtgttttaggcaactgaaaggcttttttacaattgtagtaaacactgactgccagcattctggtaccagttactttattaaggtaaattcccaaaactcacaatagtgggaaaaaatactgataagccttctaaaacaccaaagaagtgtagaacaacatcttggatgcttttagtcacgagtcagaacgccgcggtggttacagagcaatagcatttcagagctgggagagaccttagagatcatgtattttgtggattttcaaatctttgaagaatgatgttctgggtaaggaagctgctaagagtccatgagctagttagtgaggactgctacactcttacacactcactcccggatccctttgtgcatgatttctgtcattcaaccagtgttcataaagcccttgtaacatggaggataaatatttgaataagatactggctttaccccgcagaagcttagagctttgaaaggaggtaagacatataggtaaataatacacataggaagttattttaaaaatataatgagagttattagagttcagaagatggaaacttatttcctagtgaaatggatgactgtgtcctgtaatagaatatttactatatttagtaacagatttatacagtctcatttgttttagttaagaagtttgagtatccaacagagaaaaaaggttaggtaaaaattaagtacagtgaggccaggcacagtggctcacacctgtaatctcagcactttgggaggctgaggcaggcggatcacttgaggttagaagttcaagaccagcctggccaacatggtgaaaccccatctctactaaaaatacaaaaattagccaggtgtgatggtgggtgcctgtaattccagctattctggaggctgaggcaagagaattgctttaactcaggaggcagaggctgcagtgagtcgaggtggtaccactgcactccagcctgggtgacagagtagaaccccatctcaaaaaaaaaaaagaaaagaaaaaattaagtatagtcatgtgtcactgaatgatggggatgtgttctgagaaatgaatcattaggtgattttgttgttgtttgaacatcatggagtgtacttccacaaatctagatggtatagcctcctacacacctaggctagagggtaggactgttgctgtactgaatagtgtagccatttgtaacacaatggtaagtatttgtgtccctaaacatatctaaacacagaaaaggtacagtaaaaataagattatcttatgggaccaccagtatatatgtggttcgtccttgactgaaacgttatacggtgcatgactgtatttggtttagcccatgtttttattttgaagaaatgcagaacaagtttaaaattgaattgttgaattgttgtcattagttgatagcctaataagaacatattgttcaagtacaagaatatcattgatttaattaccctgaaaatataattttgaaaaatatctacattttttaaaaattaaattttcgtagtgtaaactaaaattaaatactcaactaactgagagagagagagagagagagagagagagagagcccttccccagctagtctggcagcaagtgatttctaaaggccagaaataggaaaaaaaaaataatcgaatcaaattgacttttggaattgtccttatgaagcacaagtctacaacctttaactcatagagaacacagtgagcatatctgctttgactggcaacttcaaaaaacccctctcccagaggcttgggaaaacacatgttggacacagactaatgataatgtggaacaattattacaatgaacacaataattgtatttgttttatgaacatgatagcctgaagaaacccataccaagaaatattttacgtgttgtcatcattaagaagtcagcaaaccttaaagacaaacacaatctattcatccatccatccatccatccatccatccacccattcatccatccatccacccattcatccatccatccatccatccatccatccatccacccacccacccatccatccatccatccatccatccatccatccatccatccatccatccattctgtaagtgtttattgagtatccactgcatagcatgcaccattcctggcagttaagaaaataaaaggcctcactctcatggaacttacatcagaaagggcaatattaatgatcagccctgaccacatgcctttccctattaatgatcagcccggaccacatgcctttcccttagggaacattgtaggatgaatgttccctgtggtctgaatgtttgtgtctccctctaaattcataagctgaaatcctaacccataagatgatgtcattgtaacattgtagggtgtattttagttggtgtggatatggaggcagaaaagcaaggatactggtgaacctggggaatgcttaagaggttggactgtgctgtacccgttaaaaagcaataaacaggctgggcgtggtggctcacgcctgtaatcccagcattttgggaggccgaggcgggcggatcacgaggtcaggagatcaagaccatcctggctaacacggtgaaaccccgtctttactaaaaatacaaaaaattagccaggtgtggtggcgagcacctgtagtcccagctactccgaaggctgaggcaggagaatggcgtgaacccgggaggcggagcttgcagtgagccgagatcgcaccactgcactccatccagcctgagtgacagagcgagactccgtcttaaaaaaaaaaaaaaagcaataaacagaatctcatgcttctatacaataaaaataaccatcttccctatagatgatgaagagtctgttaatataatctgacaggcttgttttggaaaatatttagatacttatacatccagatatattccaaaccatagccttgtaaaacctctgagctagcgcaatccttgagtataagtctacctccacctagaccaatgtttccaaaccattctgtggctgggaagactggaaggacccccaggctgaccctgttgggaagacatgcaacaaggcttacttcttcagtggtgtcagtgattttgagccagttctgaccatccactcatccgtctgtatttgtgtagtgctcactatagacaaggcaattttggggaatgcagttgtaggaaagatagacatggctcctgaccttatgaaatgttcagtcttgtgaggaagacacaaataattacagcccattgtaagaagcggtaaggtgcttttgtacccttttggtccatttttctttttttttgttttgagatggagtcttgctctgtcacccaggctggatggagtgcagtggtgcgatctcggctcactgcaagctctgcctcccgtgttcacgccattctcctgcctcagcctcccaagtagctgggactacaggcacccgccaccatgcccggctaattttttgtatttttagtagagacggggtttcaccgtgttagccaggatggtctcgatctcctgacctcatgatctgcccgccttggcctcccaaagtgctgggattacaggtgtgagccaccgcgcccggcctggtccatttttcatcttgaccatggaccacgctggtagatgcctgggggcatgagggacatagcaatcaggctctgtcagcctttgtgaccagcacaacttatttccagtgcattaaagaaaatgatactgcctatgcccaatttagatgtgggccagctgtgttagttagcttaacacagcattttgttttgcatatgtattgattttgcgcacatgctctctaagtgcctcagaacactgcctacagcatcctggtgaggttgacaatcagttgtcctgtccctgttcatctggcatggggacacactgtcagaggaggaactaccaagtaagtaattgcctccagcacacaaaaactgcagacacatggttgacataagaatctagtttcagctggtggttttcagggcaaagcaactgcactaacaggagatttccctgacagctgatttaaggctgtggaagaccccagtttatcagctcaaattgagaatgtccttttttgactagaaacgagaccctcccagccaactgcacaaccaaaacttatattcaggatgtccaggacctgaaactgacatgggagtcaatattctacagccagttgtggtgtcgacagggtctgggggaaatcttcagagctgacttgtgatgtagcagggcttacagcaaaggcatccctttcaccttgctctttaggattcatattctaagaagctgctaagaaaaaatgtctaaacggagacacttaggatatagttttcatattaatgttttattttaacaataatgggagcaaacacctaccaggtgtttactctgcgtcaggaactgttctgataatcttatttgaactttgcaacaattccatgaggctagctactcttaccatcctgttttacagctggggaaactgtggcacaggaaagttaaggaacttgaccatggccacagagctctgagtgtcagaaagaagatttgaaaccacacagttggcttcgcatcctgtacgcttgactatttctcttttctgcctctcttgggagaactctgaaatactaaagtactatattactaaataaatgcttgctaaagcatttatttggtcccatattctcaatttacacaattcttttctccaatcacatttcattttagactttatgagccctgttgaagtcatcagcttaaaagtgcccttgagcaattctctactctagattgagttaaacagagtatctgtagataatctagaatcacagacaatacctgtcttagttcctttgggtcgttataacaaaaataccatagtctaaatttataaacaacggaagtttattttgtacagttctagaggccgagaagttaaagatcaagagaccatcaggttcagtgtctggtaagggcccactctggttcacagatggtgccttctcgctgtgtcttcacatggcagaaggggcaaacaagctccctgggctccttttttaagggcactaatcccattcaccagggctccaccctcatgacctaatcaccttctaaatgccccatctccaaataccatcatcttgtgggttaggatttcaacttatgaatttaaagagggacataaacattcagaccacagcaacatctaattttgagccacctaactttgaaagaacaaggattgattaatccaatgtcagcatacagtataccattagatgtgagcccctcttggcaaacttgataaaagtgtgagaaaaaaattacctagaagactaataaatacagaatagtcacatataatttctgtttaaagatttataccttaccaatttccccaaaatgatttaacacaactcattaaatatttgtaaaataatttaaatcttaaaatatatattgggaaccagttaggaggagagagaaaaagacaccggttcctagaccagcttggttattgtacttggacatttcttaggctctgaattttatggacgctaaggcaaatggatcacaaaggagtaaaagataggggaagggaacaaaagcatttagtgtgctcccactgtgtgcagatcattctgttggccactttcccataccttacgccctttattctcacaacagacccttgaggtagttaccgttattttcatccacatcaaagtatgtggcagaggcaggatttgaaccaagcctatttgactccaaagcctgtatgtatttttttactaggtttaggttttattattcttacccaataaagtgacatatgatttgtctggagatacctagtcttcctttgaggattttttaaaaaatggatccctatgtagagaacattgggtaaaatcatagtaacctatgaaaagtaggtattcaatcaatgtttatggaataacatgagtaaataaatgcatggataataagatgaaggatatcttctttaattttataagctaagtaactgttttttgtaaatgcttctatgttaactattaacctctataaaaaacaaagccatatcttagcttcataattcagtctaaggcagttaggtaaatacttaacaatttaatattttatgtttttttctttcatagtttaatttctcaaaagaatagccgaggccccccttatctttacttcttccacccctatttacttctcaacccactgaaatgtgctccgtgtttcctctgattctgttcaaggtcaataatgaactcattaattctaatccaagggacactttgcattctctgtcttttttggtctctcaggggcatttaacattcttagccacttgttccgtcttcctctttacctctctggctgctcctttgtaatcttctcttttatattcactcatgaagtattgaggattttcatggatctgtcacgggttgtgttctgcttgccttctactctgcacctccctgggtcatctcatccactctcataactccagctgccagcttcatgcagaagactctcaaatctgaaaactgggatcaactattttttatatccaaatactctaaatgaagatctaagccaagactgtctatcttgaaagtaagttatttctgtctatggaggcaaaggctcacgtaggaagtgaagaatcttatatatttctaagccatttcttggcagtcagtcacgtattaggagtcagttctgtgtgtttttaaatacagcattgaacgactcagtgtttgttgttattagtgatttgttggacaggatagagagaaagcacagttatttaaagataaagtgtttgtagcccttctcaattgaatagcatacatacagataagatgtctgtgaaattttaatagaaatcaatgtgaaataagattcaatttataaaatctcaaattacaggcaacttgtcaaagcctagctgttgtgtaaacgtgggaattcacacaaggaaaagatgattgattggttgattgattatataacatgagttacattctatccaattgcacctgaatatattcacagacgcagctggatggctctgatttagagaacaagtattttcttcttttcacacaatctgttcctagaagcgccatcaaaacataaatattattttctcataataatataaggcatagtgattttattcttagccaaggatttagtgttgtagaattagttataattaacaatgtgttagtaaagttgagatagtattttaaacctatctgagtacttaaaataatgtaattttgctccagattctgccaaaaaaaatggaaattatttaacctaggattctaataactaacagtatccatagcattaaaaattacctttacatattgtaaatgtcacctgcctacaaataacatgtccattaaagtaaacattacttaaatatgcagctcaacagggcctggtttctttacaattaactagaaaatttgaactaaatcttcctgaagatttcttctctattaaaaacaaaagctgcctcctttccttgcttcacagctttttggacctgcctgtgatgagtgtcctttattgcccagtgtaattttgccatggtttttagcaatctgcaaacactccagcccaggtaacctgacggtagcatagacaggaaaggaggggatgtgaatttctgcctctctgcctctagtggggctgctaaggtaccagccatctaaacatctgcccaggtcttggtgcagtccagcttttcagcagagtcaagggcagaaattctgcccgacttctgtgtctggtacctatttgtacaatgcagaggtcccatgcaaattgttttcctttgaaataaccttaatgatttcttcaggtttcaactacagtaaataatttgttaaataaaaatattagaatgaaaggggggaaaagaaattacttcctctagcaaatgagactcttaaattcaaatttaattaaccaagacgcccccaaaccacagagcatgtcacccagcgttgacaattaattagctttgctctgaaagagctacaggtacccagcaaagagttacggattaaaggctttactcgctctgcgaaggctgcccatttctagctatcacaccttgatagtggtttgttgcttcaggcaacaaattacatctgaagtgtgtgatttcatgtccgtttttaatttcacacaattgaaatatgggaaaagtgaaaataaagctctacttcttttcaaaataaagctctatttctttcaaaataaagacattaaaagtgaacaacactacttcttttcggtttctcatgctgttcaagataattttctatcaaacggtgaaggaagataaatactaaggaaaactctaaaggaatgagtggtcactcttggcttttaggcgggctctctgtttatggtagaccattcagcttcttccttttagcattaaattagcatatgtataaatgatttaactagaaacttggagctagcatctaaaaggcagcatggtgtaatgaaaagaacattagattccttcgattcttgaaatcagattatctgggatatgcttatcccttgaaggaatcttaattttagttggatagtccttaaactagaaaagatatacgtacatattttatagacaattgcttctcagccgaaaaatcaggcactgacattccatgaggaatggactttaattagccggtgattgtctttctctgtctatatttataggcaaccgaaatagctgggttgtaggtacatggtttcatcaattccatttaataagaccagccagttcactatcattcatgttcatgaaagataggaataacgtcagttaactaaaatcatttatatctggctttgggatggctttttttttttttttttttttttttttgagatggagtctggctatgtcgcccaggctggagcgcagtggcgtgatctcggctcactgcaagctccacctcccgggttcatgccattctcctgcctcagcctcccgagtagctgggactacaggcgcctgcaaccacgcccggctaattttttgtatttttagtagagacggggtttcaccgcattagccaggatggtctcgatctcctgacctcgtgatccacctgcctcggcctccgaaagtgatgggattacagacgtgagccaccgcgcccggcccgggatggctttttaatgcatgtttaaatggatctggtgtcttaggtgtttacagttcttttaatttatgtattaagcccagtttccataattgcatactaggtggaacttaggaaaaggcaagaagctattaagtttccctggtactaagcaggcctgggggtgggcagatcaggccaggaacataaagacctgcagtcagggagcatccgataagaacggattgatggtcaaaaggtcagctggcacagggaaaagtacgtgtgcacctaagtgcagatgaaaaagaaagatccacccacactggcgccgaggcttgcaagtggatgtctggcaagcaagcagaagccgagatgcagatcaggaagctaaaataaagaagctggggcatctgggaagaccgagacccagggctccgcacaggctaaacagcaggaagaagagcgagtagaattggggtataggcgtggccaggtcatcagttacccaggtgcacggcggctgtcaggaggtcaggcagcaggcaaaactctgttcacaggtaggatagtgtgagggatcctgcccgctgtgctttctcaagtagggactttttacctctcattgtccaacgtacttctgcttttctcctccctgatgaagatcttgtgactgtgtactggcaggttggagcccacccctccaggacagcagggagcaaaggaagggtagctttgtaggtgtgggtggagataaatattcatgcatgggcaatgaagcagctctaagctatggaatcacatgtcaacccatatgtcacgtggcatcaaaggcagtttatacattggtaaaatgttcctttgaacttttctattccacaggaattgggaataagttttgggttatttcatcttccagtgtccttaaaaatgtggagcatgctctctcttaaaaatatgaatggttgctgtggcttagagcaagtcgccaccttcccgaggtcatccaactctcagaaacagaacttctctgttttaatgagtgtttttctctagatcttgacctagaacttgttgtctaggcagtatctgggtctgacttactaggtttgctggacagacagaaatagaaaagtgcaatgagacaatcgatatgttcttaggtgcccacagagtgtggcaccaacttgtcaagttctggacaaaattagattcattagtgcagaagtcctcaaccttctcttgggtcctgaagcccagcttttgcagatggcgtcttagtcattagtaaggccgctccatcggagtccccgtcatacaaaatattaaaggaagctgtgaagatcggttgcagtgtctgctatcctgctgtcgtctggccagaggtgagccgagactgtggggcagcggggtactgagcagctgctgtataatgagccgagaggggttaacccctggcaaggcaagcagaagagtcattcttaacatgcttagaatcccaatattcattgcagcagcttcaccaaccctgaaaaaccacagcatcagatggtttcttagtaaatacacttatcagaaacagaggcagagggtgcttccctttgaacttctgagacaaaagcccccagcaaggcatggattctgccaccgacggagtatttatttggtctttctaaaatccagatctctgcagccaggaaataacaaactcttgctttgtacttctgtttagccttccatgccaatgactatttttttaattaaatattttctgctttatttttgtgtacaaaagtgtctattttcacacagggaacttggctcagcaaacattcgtagttacttggctttaaacaaaggagaaggttttacattgaatagcttttatttaaaaattggtttatactatcgaaaggaaacattgaggaaaccccccagggcatttggactgggcacagatttcttgaggaacaccccacaagcacaggtaaccaaagcaaaaacggacaaatgggatcacatcaggttaaaaagctgccgcacagcacaggaaacaatcaacaaggtgaagagacaacccacagaatgggagaaaatatttgcaaactatccatctgacaagggattaatacccagaatatataaggagctcaaacaactctatggaaaaaaaaatctaataatccaatttaaaaatgggcaaaagatctgaatagacatttctcgaaagaagacatacaagtggcagacaggtacatgaaaaggtgctcaacatcattcattgatcatcatagaaatgcaaatcaaaactacaatgagattatcatctcaccacagttaaaatggcttttatccaaaaatcaggcaataacaaatgctggtgaggatgtggagaaaagggaaccctcatacactgtggatgggaatgtaaattagtacaaccactgtagagaacagtttggagcttcctcaaaaaactaacaattgaactaccacgcaatctagcaatggtagtactgggtatttatccaaaggataggaggtcagtatatcaaagagatagccaagctcccatgtttattgcagcactattcacaatagtcaagagttggaagcaatctaagcatccatcaatagacaaatgaataaagaaaaggtggtacatatacagaatggagtactcttcagccataaagaagaatgagatcctgccatttgcaacaacatggatggaactggaggtcattatgttaagtgaaattagcgaggcccagaaaaacagacttcacatgtttttatgtgtgctgcccagatgacacaattcaggaaaatctttcagctcctaccagagagtaaagctcttcagctgtagtgggtttacctgctgtgtgtcttcaggcttctcccagttctttatctctgctgtggagccaatataaagttatcaataacatttggtggtgtagatgcttctcatctgtgcaatttaggagtagactctaatacagagcagctgctgggtgaaccaaagatggctttagtgatatttatagcttattgattgcatagttctttgtctgtgattatcattcaataaatactgatggactgagtttcccggaacactgagattcgttttaagcagcttccagcattctttctgtgtatgtggggggaggttcaggaggcagtagaaggtggccataataatgttgtcttgtggtggtagtagttgttataatttcccttttatatcctaattctggccacgacctaactcactgtactgagacattttccccctataatatggagatatgttgctaagcaaccagatcagtaattggtaagtgcttatgtataatatgatttgatttgagttacatacaaaaatatgtaaatggttttttatcttcattattagataaatgattatcatttggttttattttgcccaaataaaataactgctttcatttaccaaaattaacatgatgtagtagaaaggccttggatttagaggatggaaacacgaatgcaagtcccaggtctgagagtcagcagccctgtggccatggctaaagtcagggaacttgccaggcctcgttcttttttttcaacccgtaatgtgtggtacaaataccttctctgctggcctcccagggccaggttaaggatggatgtgatgatgtatagaaaatgttttaagaaaaaaaaaatccaaggtctaagcattgtctagaattccaggctacttaatcttggaactctgagtctgttagtataattccaaaggctggattgactaagaagtactgtcctccagcagggcacagagccatagggcaggtctgcgcctatagaagaaagtaaacacatggcatggaccctgaataagtgaacagtgcagtgatggtggcgaggcagaagcaaaaggccacatggtcaagcaccctgtcattaagcattaaaacataagatagatcatctcaagaccaactgctggccaggtgcagtggctcacacctgttattcctgcactttgggaggctgagatgagaggatcactcgaggcgaggagttcaagaccatcctgggcaacaaagtgagtccctgtctctacacaaaaaacctttttcaattagccaggcatgatggggcacacctgtagtcctcgctactctctaggatcacttcagcccagaagtttgaggctgcagtgggctatgatcatgccacagcactccagcatggtgacagagccagaccctgtccttaagaaaaaaacaaagcaaacaacaaaaagacaactgctataagacttcaaggggaaggacaatgatccacgggggctgaagtcactgatgagggcaacttctacaagtccttgaagcataggaaaattcttttttcttttcttttcttttcttttcttttctttttttttttttttgagacagagtcttgctctgtcgcccaggctggagtgcagtggcgcgatctcggctcactgcaagctctgcctcccgggttcacgccattctcctgcctcagcctcccgagtagctgggactacaggcgcccgccaccatgcccagctaattttttgtatttttggtagagacggggtttcatcgtgttagccaggatggtctcgatctcccgacctcgtgatccgcctgcctcggcctcccaaagtgctgggattacaggcgtgaggggaaatttttaagggtaaattcacagcgatgatttccattggttaactctgtgcattaacatgcaaatgtcaatccatttccaaatgataacagtgcctggctgtagtattttaacatgatattgtttgaggctaatggccaccatgtttgcctcctagcagtaaacatgttatttgaagtcatgtcatgaattaccttcctgcactaatgaaatagataatttacataaaaatcaggaaaaaaaaaaccccagccccatatgcttttcaatctctagagccatggaaatgacctccctgacagccaattagaaaatacaaaggtgaaggtggatgctcttattcccgatacggagaagttccagaatgactagcgtgcttcttggctatgcccaaatacttttaagtaggtgttatttcataataaagcattaatggtgtttgttacatgtggatgaatatcttcactgtgtctgggagctctgcctcagaacgtaggatcttgttccctatccctgctgtttataatctgttttattaccttctcccactgtgtcatggaccggatggtttttctaggggctgctgtgatctgtcttgtcattgcttattatcagatagccttaatcctcagaacattgaaatagttctataatggcacgtgagccatggcagcccacagcagcactggccattttcacatgaaatggcagcctggattgtcctttacatgctgacaggggagactgtccatctgccacccctgtcctgggtcgggaccctttctgttcagcaggtgcagtggctctgagagtctcacagtttttcagttgatatctcacccatcaattacctgggttggatttgtagagctcgaatgacctcttaaattttataaacactttacccacctatttgagcatcccacacttgagcacccctcagacaagatgaaatattcttaggatagggttaggaacacacagtattcctgaaacttttaaagatatagaggtccttaaaaattaccatattgcctgattttcctgtctgtgccccaaggaaagttctattcttcatgaagctaataatttttaaaagattgctaggtcaatattttagtaatctttagacactaaggataggagatttcaatttaattctcatgagatgcacttagaatgacgggttttccatttgaacaccctgcagttctcacaatccagggtaatagtctgacaaatagtctattatacaattacaaaaaaaaaaaagtcaaaatcaagttccccctctaatctacataattgagacctaagactttccctgcacttaaagccattgaatccaccagatgagtgtggacctcatttttttaggtttgggtagatctggccaatgagagcaagtaaccatcctatgtgaagttcatttcagttctaaactgatccttgaattcagatattgtcatattgatgcattaggagaattgtcttgggtgtgagatgagtgaggctatggagagaaaggactggcactcagagggaagactgagcttactgggacattctagccaaggacaggctactgctcttctcctcactgcctgataatgctcagtgtggcaccactttttttttttttatttctgagacagagtctcgtgctgtcccccaggctggtgtgcagtggcgtgatcttggctcactgcaacctctgcctcccaggttcaagcaattctcctgcctcaacctcctaaatagctaggattacaggtgtgcgccaccatgcccagctaatttttgtattttcaatagagatggggtttcaccatgttagccaggctggtcttgaactcctgacctcgtgatctgcctgcctcggcctcccagagtgctgggattacaggtgtgagccatcgcacctggcccactttttgtttttttataggtgttcaggaaatattaatttcatcctgctagagagactttttccttgaaataaggcacagataattatatgaagctaatggatgtttaaagatgtatgctgggataaatagctttaggaaatatattgtactatccttggtaagaataagacaagtagtttttaagttatggtagtttttaagttaatttttctgctactggaaatcttataaaacaacccattcattttttcctatgaaagaaagaacttatcaggcattaattacataaaatatacttctaatcaaaatgtctttaccttttcttttttttttttttgagatggagtgttgctctgtcacccaggctggagtgcagcagcacgatctcggctcactgcaacctctacctcccaggttcaagcgattctcccacctcagccacccgagtagctggcattacaggcatgtgccaccatgctcgactagtttttggattttagctgagatgggggtctcaccatgttggtcaggctggtctcgatctcctgaccttaagtgatccacccacctcggcctcccaaagtgctgggattacaggcgtgagccactgcacctggccgtctttaccttttcaattctctcatgactgcctctcctttatgtccctaaataatacaattatacgtgaatgatttctcaaccttaaccttctcttctctgtgtcattgaagtgctatatgaaaagaactgaagctgctgacctctaagacattggaatatataaaaaaagatcaaacagctgcttataatgatgtcaaagataaaatgctattatagaatctatggctgtaaaaatgtgatttatattaatttttagtattctgaaaatttcctgatatatttattttatacacacattttaagaaaataattttatatgcattctcaagatgacttcctctatcactgtttttctgcattgaagccaacggaggctttcctaaatggagtagagtccaggagtcattgcagaatctctatactggaaatcattctggttccccactgcacgcatccctctccctcgtattcctggtaagcagttttctacccaccatttggatattttcagtgacaaaacacactcactattttatgaagccaacacatcactagtgggttattccaattttgagagaaatgtcgcttatacttatcaagctaaagatgcttttatgtttcacctgctgctttggtacctgtattacataggtttaacccctattcagatacaatacggtacaatacaggacacataggcctagattcagccttggctctactacttattatttattatattctttcaaaggatcattgattagtgtactaaatgctttacatgtactgtcattaaattctcataaaaagtctaaaaaagtaggtattatttttgcttcatcttcctatgtggaaactgaggcttgataataatatttataatagtgatgatgatgatgatagcattgtcatgtgccaactgtgttccaggcactgtgcttgggcctttataaacattatcagaatttaggtaacttccctaagattatctacctagcatctaggaagctggatgttcaaactaagtcagaaaggcctcaggatttaactgccttgagcttcacttgtttgtctgttaaatgggggtaatattgttctcctcacgagggcttctgagattcaaaaaaatggcttatgaaagtatctggcatccttgcttgaaagatacttccacatgtcatttattcatttctttaaagagagctttcttgaaagactctttccttcctctttctccaggtttcttttctccaggctaaatatccccagctcctgtagtcttcgttcattcattcaaaacataccgtgagctctcttccctggtaaaatttacattctagaggggaaacagacagtaaagcaataaacatggtaaccaagtaaagcatctgctatgttacaagataataggtgtcatggttgtgaacaaccaagataatggaaattaggagtctgggagtgagtggtgttttattgactgtggctgtgtgacaaattacccccaaaacttagtggctaaaagcagcaatgatcatttatcatctctcgaggtttctgggggtctaaaattcagataagacttagtgggtgtgatttatctctgttccatgatgtctgggacctcaggcagaagacttgaaggatggcatctggaatcctctaaaggctcattccttcatatgtctggcagttgatactggctgtcttctggggtcctcagttcttttccacttgaccctctccatgtgacctgggcttcctcacagcatggaagctgcgttcccacggtgagtgtctcaagaaaggaagccagggagaggccattattgccttttgtatccaaagctcagaagctctacagcatcacttccattacattctgttggccagggcaatttcagagttttgcttgggttcaagaaggaacatagacgcccacctctcaaggggagagtatcagtgtcaggttgtaagaagtgcctgtgggagacacatggatgcagccatctttggaaaggactgtctgccatgatgggcaaggtaggttcacggataaggtaacatttgagcgaagatttaaaggagatgagggagtgagccatatgcccatctccatctcggcagagcattccaggctgactcaagagcctgtgcaaaggccctgagatggggattggaccaagaatatttggaggctaggatgactggagcagaatcatcaaagaagagagtagtaggaaaagtggtctgagggatatggggggaagggacagaccacgtaggctttataggccactgcaagtactttggcttttactctgagtgatatggagagccaaagggagggccttgagcagacttaaatcttaaaagagttactctggctcctttgtgaataggcaggtggagagcgagtacagaagatggcagacaagttaggagactgtggcagcaattcagcaagagaagtctgtggctctgaccaagatggtagtaaaggtggtgagaggtgatgggatcacagatctactttgaagttttagccaacaaaacttcctgatggattatgtgtgagaagaagacaggtcagcatcgaagaagtcattggaaggatggaattgccattttctgatacaggaaatgctgaatgtgtaacagctttgcaggaaaaacatcaggacttcagttttagggttggcaagcttgagatgtttattagatatccaagtggaattgttgaagaggtaattagatacataaataaggatttccagagagggatctaagctggaaataaaaattgattaatcataggcattaaggatgttatttaaatcatgatcctggaagaaaacaccaagggattgagtgaagcagtaaagaggacaaggactgagccctgaggcctccatcgttaagaagctgggcagaagagaaggaaccagcaaaggaaactggaaaggaatggccagggtgtcctagaaaccgagcagaaagggtatcaaggaggaaggacctactcactgctctgagaggtcaagatggggctgagaaccattaacttgagcaatcatggtggtcattgggaacccagacaagagcagtttcagatgagtcatgggacacatgcctgaatggaatgagcttatagataatggaaggagagggcctgcagaaggccagcacagacaacactttccctgagttttgcggccaagatgggcaaggaagtagaacagtagctggctggggaagaatcaggagaaggatttgtgttttatgttttaagatgagagaaataacaacatgtctatgtgctgttgggaatgatctagtagcgtgaaagtttgtaggagggagagggaggagggaaaccttggagggatatcctggggtgtgctttactttcagggatcctcgcttttctcctcagcaggggatgtgtggggtgggcctgggtggcagagataagaaaaaggaaaaagccatgaggctactgcccgttctaagctgcctttcagtatcactcccttcccctgtctgtctctccatgtggactgggaaccccagcaggtaggggagtgggaaccatagccattgcctggtcctttttacactgtgaaaaggaaccttgaatgtagatggataaacaccatcttttagttcctggcagatcactgtcttccttcttgttctagtcctctgagacataggcaggctggcttgagagcagggagggatcgctgagcagaggtgtgtgcgggtgttagaaggtgccatgatgccttgtgccaatgactgacctgggatgagtcactgttcatttagggagagaatttcaaaaggaatgactggtcattgaataattccatttcacccttgattttagaaggaaagtgccaggaagggtagcaatgagatgaaaaaaaaagtattcctaggtttttcttttcactgattgaaaagaaagtgtcccgtgccttccctttctcatcatcctacaatagggtgacttagggtatcttcccatcaaaatcagtaattcctcacatatctcttccccctgtatttcactcttgtgaaacagattttcagttttacagatgagaacaattaagctttgaaatggtaacaccatttgctatatttgtgcagtggcaattttttagctcagaatttatcaaaagcatgacacttaatgatacagaattaaaaccagctatcccagaccattgaaggagaccggggtcggggagggagaggcggtgcaaacggtgttgcttttgtctttctgacctgcttctctcgtgatgtgttctgcaactggtaagaacattggatgaattataagattttaatcagtagaataaagtcagggcggtcctttcattttaagcagcagctcaaacatttgatgaggaaattagaatccttagaataagagtttagtgtgtaaacatcaagaattcatccagaaatgagtatattagagtctgtgaaatgccttcgcctcacactgccccttcccctgttttcttcttcttttctgtgataagatgatcatggatttgttttgtttttcttttgagacggagtctcactctgtcacccagcctggagagcagtggcgctatctgggctcactgcaacctccgcctcctgggttcaagcgatcctcctgcctcagcctcccgaatagctgggattacaggcatgcaccaccacacccggctaatttttgtatttttagtagagatggggtttctccatgttggccaggctggtctcgaactcctgacctcaggtgagctgcctgcctcggcctcccaaagtgctgggattacaggtgtgagccaccgtgcctggccaagattatcatgttttaagtgttacaggacacttgaatgatggacgatgtcattggaacagcctatgttattaatgatgccggcagcctcccctcccacctttccctgccttcacactctgtgcccccttcagtgctttgaccccttactcctcgcacttgaccatgaattgcattttgtatttaaagacctccctgcacaatatcctcttatctacgtaagcagcccatagcctcagcgccctgcaccctggttggagttcaccttctgatttggtggtatatttctaaaaccagtttgatttttcctgttgcactggggcttgtgtttttcttccagtgccctgtacatagcatgccttgactggtctccacatcgttcttcatcagactggtttggattttacaaggtgttagagtttttaaattagctcatgaggtctctcgcacctgagtttatgccagagaagttgtggagtgatgaacttaatgggtgcccttatccccaaagatgcccagctttgttcctgcttaagctgaatgttggtggataacacatcattctttgtaaatcgtgattgcagaatcctgctattttatggctttgtttttccttttgtcgtataaatgattgggtagctcgttaacttcactctgttatagtaagggactgctacagaggacactgagcaggaggagagaaggaatgattaggcctcagaaagaacgaggggttgtttaagagaaaacgaagtaagcctagcagatctgatcgtacaatcattttccccttattgttcctttttccactccagagctgcccagaagttaaatctgtcttctaaaaagaagaaacatcggccttccacttcttccgctgccgaaccaccgctctttgcaaccagcttcagtgggattctgcagacctcccctcccccagccccaccctgcctgctgagggctgtcaacaaggtgaaggacaccccggggctgggcaaggtaggaccatccgccgtccctgccatttgcccagtgtgcgaggttctggatcaagtttcaggaggaagaaaatgaggcctccaatgtattaaaataagacgttgccagggagaaaaggaggcaagatgaaattcatttgaaagtcctgaaaattgtcatggttgcatacactaagtggtaaactaagaccttcagattgtaagagatctgatttgcttttggtgggaaaaatcagctttgcattgtttgacagaatcgtagccatttaaagaaaagacacaaaggcacaaaatatcgaggcaggggcaggagaccgagggaggccacagcacaaggtacagaaatgagacgtaatgaggcctcataatttccctgtgacactttcgagtttttgcctcctcttcagagaaatcctgacttctgctttgaagcagcccactgaggggattgtgaggaacgctgcagtcttgcctttctagccaacaagtgcgatttcgaattgttacaaatgctcaggaagagatgtaggatcgtgcttacaagctgttgctcagctacacttgggatcactttatttttaaatgtcatttctaaattctttctcccttccgaggaaagcgtttgggtgaagtaacttacggtttactcatcattggtgaataagccagggctcatacaaacatgtagtgaaagaaagacgtggcggtttaattttttatttttatcaaaagtaggagtggtgcacacgacctcactggtcctttacagacttatcgtgactccggccctgggcttcatttggccgccgttgctagtcttgctgaagctccggagcaactactaaactgtggggatttagattttacttgttcagttcgcagactgccagtcccctgggtacccaaacacggtcatggctgggtttctgggcctcagaaggcctctgtctctctggagtctccccttgcaccctctaccctctcttcttttcacctttcccagtttctcccgtgtccttccatgctctcccaccctcaatctcaccacctcgttgggaaggtattaacttcatgtggtacttttcccaagaagagtttaaattttaagattacatggaataggtcaggcactgtggctcacacctgtaatcccagagctttgggaggccacagcaagagaagcacttgaggctaggagttcaagaccagcctgggtaacatagcaagaccctgtctctacaaaaaatttaaaagtcagctgggcacagtggcagatgcctgtagtcccagctactcaggaggctaaggagggaggatcacttgagcccaggagttagaggctgcagtgagcaatgatcgtgccactgcactctagcctgggccacagagtgtctctattttttgaaaacttacattgaacagagcagtgcctcctctgaggggaagcatccagtcctggagctttccttggtggtgggcagggcagacagttttcagctgagggctttcccaggcccagcagcaaagtaagacccaaggaggcagggaagtggcctgggctgtctacagggcctgccccagcatcactggacatggaagcaggtggaaaaaacagtgtggaccaggactcctgtccaggagaggactcagtgggtgggagcccccgaggaggggccgtggtacgccacaggggcacacgggtgtgatcgtggatggttgattcgctgccttctaaggagggtgggtccaagtaactgctgggatcttctattcttttttacattttttatttttaattgtggtaagatacaggtaacataaaatgtaccatctgaactgcttttaagtgtacatgggctcttgttttgcaaagagggatttggaacttcagtgccggagctgaactgctctggacacagtgaaatcaagctgtcagtgcagtgaccttcccctcctgtactctaagccagttctcttctgaataagtgtgagcaaatgtttaagtggtatctccttgaaaaggtgccagatgatcagccagcctggggtgctcatgtaccccaataccgccctgtccagggcacctcaaaatgaagcacatcagaaaccgtcctcctgcacctacagtactggccttgtctgtggttcctacaagggttgatgtggatgcatcttcaggtggctccgacctctccccctctatccctaatgacctccctggaattctgagacaaggacatcagggtgccaaggccagggaccaaaacagcagaaagagtgtcccagccagcaggatgacccagcactgacacaaaaatagtttagagggcaaaggacactggtccaatcttgatttcatgatgtaccatatgtagtgaccacagataaggggccttacaatgaggagttatgcttgttagtaaactaaagtttgcatttcacacttttttaaaaaaattaaagatatctctctcactgatttgcaatccaaaatgtaatcaaagccctgagttcacccatgagactgtgtcgaggagcggggcatcggtctggggtcacagaacatcataagagaaggtgtggcttccatctgcccagtggccacgtggcagctgaggccaccctcctgatctgctcaggcttctggggcatgggtaacagtgagggggaggaagtgacagttggagagaatgtgtaccatgattggaacaagaagttggctgggcgcggtggctcacgcctgtaatccaagcactttgggaggccgaggcgggcggatcacgaggtcaggggttcgagaccagcctgaccaacatggtgaaaccccgtctctactaaaaatacaaaaattagccaagcttggcggcacgtacctgtaatcccagctactcaggaggctgaggcaggagaatcgcttgaacctgggaggcagaggttgcagtgagcagagatcgcgccactgtactccagccttgacgacagagcgagactccatctcaataaaaaagaaaaagaaaaagaaaaacgagaagttgccaagaccctgcctcttcctgcacagagcatctggttcttccatttcagcaggctcttactctgccctaccatatggtgccaaactgcctgacctcagcgaaggcccatcctcccagactcctgctctctccacctccacggatatctcaccatcattaggaacagcagttctttatacccatgtggaaaaatttccatcaatttatctgttgcataatttatattttaatatcaccaagaaatacagtggagtttaatatagaacataaataattggcgctatatataaatcggcaggtttgaggtagacaagtttgatggaattcccaaaagcaagttgattgattatttaaacctgacctggagtctcctagagtggaggaggggagcaggaatctccaacgcttgagatggccctgaaggtgagagtgttgtcacccagccggaccactgcccctcagcctcagccacccaccacctccctctggaaacctgggaggccttcctccataggaacagatttcatgggtttatgtagagcaacttcttatttagtagacaagaaaactgaggcccagtgaaggtaacaggttttccagtgactccagaagcagggcaagaagtcaggacctttcggccattttatttcctactgtatcactggctgtcactagataaacatgacccttgacaatttggggtggagacaagagtgtcatggaactgcagtggtagcaaaataacgttgggaaccaattgcctttgtccagtggggaaagacatacttttcagagtcaggattgggagaggaaggggaataacagccaagaatagatacacagaatgagggagaagggaggcgtgctatcccatcccttccctccttcccactccctgctgtttccagcaacaatcccactccccagccaccaccagggagtcatttctggccactgagcacctcttgaggcaaaagcttttctggaggccatggtgatggaagaaatggaggtaatttccatgtacttggagttgaggcatgcacacgcacatgcgcgcacacacacaaaccatctcaggatcctctgcccctagagcatttcctgatacacagcaatttttttttttttttttgagacagagtctcactctgtcccccaggctggagtacagtggtacaatcttggctcactgcaacctccacctccggggttcaagtgattctcttgcctcagcctcccaagtagctgggattacaggcatgcgccaccacacccagttaatttttgtatttttagtagagacggggtttctccatcttggcgaggctggtctcaaactcctgacctccagtgatctgcccacctcggcctcccaaagtgctaggattacaggcatgagccaccatgcccagcccacagcaaatatttattaagcacctactaggtgttaggtactgtgctgagcggtaggcttaggtttgaaataatggacaaggcagagcacctgtccttaaggtacttataacttagtgctttattccagtcagtcttagaaagctcaccaatttgggccaatatgaaggacaatctgatttaaggaaaaatcaggattgtaggcttaaaatgattctgtctcactttgaagttacataaacaaattatgctactaagtagtcttatagagatattcttaataagcagataaagatgattagtggatcaaagcagcttagtccccattcatatttcactgatttggcttatatgtaaatgatgattctaatctgtttgaaaacggttgcttctcctaagtcagttcttcatgaaatttgtttgcacaattaattaacatccatgtttaaggttcatttgttagtatgtcacagcttaatgtcagagctttctgtcttggattagaagcttccagagcaaagcatgttatctgtttgacttgctaagtatatggctctgcagccacaccatggtgcatcaacatttttaaaagtgagaatggtaatggtgacagtcatattggattgatgacaatcaaccttttacccttttagggtagaagtcattcagttactaactccttgtgacactgtatggaagagaaagacaagatttctgttcagtttacattcttcttagaggaagaggagaacaagatttttaaaattagattaaaatactgtggttttttgtttgtttggttttggttttgttttttttgttttttgttttttgagtcagagtttcactcttgttgcccaggctggagtgcaatggcacgatcttggctcactgcaacctccacctcctgggctcaagtgattctcctgcctcagcctccctaaaatactgtttttaaaaaaggtactcggtagctgttattcactcagtcaacaagtagaaacagtggggatagctctctgttgttcaggaggtgatgccggggaaaatctcatgcctttcagcccaccaaggtgcagtttatttacacacagattgtccaattcctcattattattgctgtccttcctcatcctgaagcatgaccaaagagaaaagctctgagccagaattaacatctttacttcaagtattcataaagaattcaaatgtgatggacaattctggatcccactggatcccagtagattctggatcccgctagatcccactacactcacaacttcattcttaaacactaaagttgggaaaagcaaattgtgagttctcttttattttggttcactgttggagggggcgggaacggcataaataatacctattcatcactatagctagcctgatagctttgtaaattaaattgttagctcttctgggaaattaactcatgtgacgttaaactccatagttaagcttacgtagagttgggggtggtggttgttttccctttcttcctttatttcttattttgagccttccttcaaccgatacctccagagaaaggcgacttggggaaaatgttctgactcttaatcttcgcggtttcttttttcccacggatgtagatttcgccagcctctggacagcacatgcgcagtatgctgctagcgccgccccaggcgcccggagctcaggaagcgcaggtggcgctgccagaagggccatgctatttctggggcaaacctgaaagacctcagacacaggggctttcttctatgccatgccactgttgaacttagcactccccgttcttgcaaagagtgggaactgttaggagaatattctccgttagaggttactgggcaggaaagtcatcccaaggacgtgtataaagaaagtgtgagccaggcatggtggctcacgtctgtaatcccagcactttgggagattgaggcgggtggatcacttgaggtcagaagttcgagaccagcctggccaagatggtgaaaaccctgcctctactaaaaatacaaaaattagccaggcatggtggcaggcacctgtaatcccagctactcaggaggctgaggcaggaggatcacttgaacccgggaggcggagttgcagtaagccaagatcgccaccactgcactccaggctgggcgacagagcgagactccatctcaaaaaaaaaaaaaaaaaaaaagtgtgaagccattttcattcattattaatatgatcacctttaattctgctgatgagggtgtgtggatatcattttctgttgtcttcattatcaaatggagaactagaaggggtaagcagcacattttggtttaattagatcagatttatgataggatggcatatcgctacatataaaatactcattttctggcgttcctggccagagatgtctacacagagcaaaatggatgaaaggacccacagtgagcagggaggactggtttggtcctgtagcccagagtctcctatcttatataccaggtctgttcttgagctttcagagtgcaagtagagaaacagaatttagcatccactttctccgtggagatcctgcatttcctacttctctgaacttcccctgcctgcttcatatgagtagacaggctcttctgaacacatttttgtttaagtttcagggacctgacgccttccaggcactgatatgtgtacatatactccacaagacgtatctatgggcaagctagaattcagccccttatgtttctagtggaatgttcatttcagtttccgtcactaggttgttagcttcttgggaggaggaaacatgttcttttcatctttgtaccctttcagtgccagctcagtgctagaaaggatacacaatgtggttgaacttaaaaaaaaaaattctatacagtccgtgtgaagtcttgatggggcgctgagcactgtgtagggtccgtcctgaaagaggcagctgcaaaaatgaggcagaaacagtgaaaacatggacgtgaccagaacccagtggtccttggctccacctgctcttcccagggtgcgagttgtcccagggttttacatcaggaagaaggtgacgcttcatgccacacgctggcaaagaggaaacagtgtccacattcctcactgaggaattttctcgaagaccttcttgtcctgtcctctcattttgcatgtaaggaaactgagggccagcaagaggcactaacttgtcatcccactttgtgggagaagacaaaagtttaaacttctgaatgtaaaagatgatttgttgtggaaaactgttaatcagaatttgaataagagattcgtaatcttttcctcccattttgcaacttttttttttttttaaaaacagggtttcactcttgttgcccaggctagagtgcaatggcacaatctcagctcactgcaacctccgcctcccggtttcaagcaattctcctgcctcagcctcccgagtagctgagattacaggcacccgccaccatgcctggctaactttttgtatttttagtagaggtggggtttcaccatgttggccaggctggtcaactcctgacgtcaggtgatccacccgccttggcttcccaaagtgcttggattacaggtgtgagtcacagcgccctgccccattttgcaacttttgatctcaattctgctggctctattttaaggtattaaatggagatggtaggcttgtgtatgtgtgtgcacgtgtgtgtgtgtaagtgtgtaggaggaggagaagaaagataatttttataaggggactttttaaaagctagcaacctttatcataattggtggacagccttggggcctcctggaatacctgtaattcctaattagcatcctgatttatggaataaaaacatgagataaaatgagggaattctctctggaataaatgccactgtctcaattaaccaaagggcaataagatggattataatgccagaatagggcttttgatcagtctttgtccaaaaaccacattttagttaagctcagcacaattagaccattactgatatcaggagaatggaaacagtaggtatattttaagctaacattcccagcatcttatctttctatagtctttctcttgttaatggatgaaaggaaagttaagcatgatttgttataattatcccattaaaatgggatcgatagaaatattttatgttaaaaaaatggtgagtccaaactgctgagttaattagaaagttttcctttgtgcctcaaacagaataggaaatgctgttcttgcctactgaattgttcgtatcaaatagaaaatatttgaatccctttctaatgcctcattgaaccaaaatgtattattatggagggggagaataattccgatacattctttttttttttgagacagaatcttgctctgtcgcccaggctggaatgcaatggcacgatcttggctcactgcaaactctgcttcccagattcaagcgattctcctgcctcagcctcccaagtagctgggattacaggcatatgccaccacgctcagctaattttgttttttagtagagagggggtttcaccatgttggccaggctggtcttgaactcctgacctcaggtgatccgcccgcctcggcttctcaaagtgctgggattacaggaaaaacaaccaaaaatagaacaattacagtagcaccgagtgctagagacaaatttcctgccaaatctcttttccagttccctcagtctgcgtctgtgttctgtgccacaaccaaagattcagatatcaattttgtccacttgtagctcatttgagatctgttaagcaacaacagtgaatgctgggtggattcgttagtggagctctgttccagctgtagctaataaagttattttctcgctgaaatcggtgatggtaaaattggtctgttttccaatgctagcttcttcagtttccgctgagttcttttctcctggagtgtgagatcacaatggcatgccttacaaaagagtgctcttgcctgctccgtcctggctgctcccaggccgaccctggctcctcaccagcaccctgctgtaaacgctcagctgccccttcccctagcagcagcgtcggcactacatttaggaccctttctgtatgtaccctgaaaacccaccggcgcagtggttaggctggagcagctcaggccagcctggggcaaaaggcagaggactgagaccatgcagtgagattggtgcagtcagtattggtggaggagctgctgggggccaggcacatgctggaaaagtggcgtgttatgtcccggggtctgaagcaagaatgggatcaggcagtgtggaaccaatttgtaaactcctcactcactgactgtcattagtaactaagttgctacaagctctttttttgtgagcctcaaaacaggaagcccagaagagtttacaacaatggaaactctcaggtttctacaggaaaaaggagaatgttgttttccccaaaggttatttccttctgcagcctggccatgtgcccctttccctcaagtttgggaagcaggacaaagggccctggggaatgccttagcccatgatgagctgagggacagtcatttttgtcccgtcatcatgcatttgatttgctccttgttttatgtaaatatataattttagacagcgtcttccttcgtcagccaggctggagtgcagtggccctgacacggttcactgcagcctcaacttcctgagctcaggggatcctcccacctcagcctctcaggtagctgggaccacattagccaccatgccctgctaattttttgtattttttgtagagacaggatttctccatgttggccaggctggtctcaaacacttgggctcaagcgatccacccgccttgacctcccaaagtgttgggattacaaacatgagccactgcgcatggcctgttttaaacattttaagaaaatattttatcatatttgcacaagaagattttcagtgaaggacaatgttttgaaaatccaatcagtaagatactcgctgggaggtatttttatagaaatccatggaaagctaatcataggaaatcggaaaaacagagagcagggtttgtagcttggcctttcccctaccttgttccgcattctataaaaagtgaaaaagtagcaaagtagcaccctacagggggctcagaggtgctggaggactaataacgcaccatttgcatgtccacgccacgcgaccctgcagtcacgctctgttacaagtacagatggtgaaagtgtggccaggaatggatgccggaagcccagaaggaagttggctcttgtctggaggctcccagggtggatctgcacagccttcccttggctgattcctgtccatcctgtggatatcagtgaaatgccaattccttggggaggctttccctgccaacctccccaaccccaggttatccaggctgggtgccccctcgtgtgcttccgtaaccccccaaagtttctcctcattgcattcatcactctttagatgactgatctgcgtaattccatgttcagtgggtctccttaacgaatgtaagctccatgagggcagggccatgtccttcttgttcccctttgaatccagagcactacacggtgcccaactgtcataggtgtcataggtgctcagtaaatactaggtgtattagccagagttctccagagaaacagaaccagcagggtgtgtgtgtgtgtgtgtgtgtgtgtgtgtgtgtgtgtgtgtgtgtgtggagtgggggtgggggattgactgattttcaggactggactcctgtgactgtggaggttggcgggcaggctggagacgcagggaagaggtgcagctggagtccaaaggcgggcagccgacaagcagaattccttcttgctcagggaaagtcagctttggttctattcaggccttcaactggttggatggagcccaccacattatggaaggtcgtctgatttactcaaactcagctgatttaaatgttaatctcatctaaaaaaatacctccacagaaatatgaccaaatatctgaataccggggcccagccaaattgacacattaccatcgcactaggggaatgaatggaatgatgacactggtttccattctgttgcgatgatccttcccatccgtataaggcctgacaatttccatgcccttgcacctatgtcatcttcctggattttttttttttttttgagacagtctcactctgtcgcccaggctggagtgcagtggggcgatcttggctccctgcaacctctgcctgctgggttcaagcgattctcctgcgtagctgggattacaggcacatgccaccactcccggctaatttttgtattttttatggagatggggttttaccacgttggccaggctagtctcaaactcctggcctcaagtgatccacctgccttggcctcccaaagtgttgggattccgggtgtgagccaccgcacacagcctccctggattcttaatacagccctgagaggtaggcagtggggcagtgcggggaggcaggggcttgttagatgctgcccatagatgagaacactgagattcagagagggcaaaataattcctagaggtgacaccgcttttcagagtggatggggtgacaccatatgtttgtttctactgttcttttccaaatcatacaacatatgagccattcatcttgtgccaagcactgttcagaaggctccatcctcatgacacccctgtgggaagcttccaccatcaccactcctcttttacactggaggaagctggaccggatctaaggaatctgcccagcatcacatgcctggtctgtggtggagctggcctatgaacgccaactctggaacctgtcctctggatggctgcatgagactgtctctctataggcaccttatgtggtcattttggtttcagaagaggtacagtaagcaaatgttcctggctggcgtgctgcagctgccttggcggggtggcaggcagggggctgtggcggaggctgaggctggtcgtcctcctctgccgctgacagtcccaagctctcttccctcatcatctcagatagctttgtggttgtcactgtgttgttttatatatgaatattttttatggatttttatatatggattgccgtgtgacttatgtttccctgccctaagcacaccgatgaaagtacattaatactcaaaatgactttgaaaagaccaaaagaaacaaaaaaagtcctaaattccgtgggaggaaaaaccatgatcctttagccctactccggaatagtaagaactgagagccaaagccaaggcggggacagcaccctgggagctgatgggctggttagtcccatcccagattatatggaggcacccgggtgattccatttcattgagaattctgtgtctagagcaccagacagtgaccacagaaatgtttaaacttcagcttttgtttaaagagatgtgctgtgagtatttatcgagccatggtctgtggggacactgctgggagagggagcatttctggaacccatcgtggctttcttccttgtctggcctcggcttttactttccttttttcatggacccctctatctcttgtgtccaaacccacctacttttccaggtctggctaagtgccttcttcctcccatgtcccacccctgtcccctactgagcccccttttctccgtgttttgtatcatgtaccatcccttgcccagatttctctgattaaccattcaccactctgttgctgtcaccgctttatgggtctaggttttctcctccactgagtctttaggctacttgagggtgggaatctttgttcctattgcgttcatatccctgaaaatgcttagccatatgtcagacagacagaactccctgaactgaaaaacacaaagatgtggagaatagcacagtccttatatgactttttccctgcttgtccctatcatttacccatcacctcttagtccatctggtcatccattgattcattcagaagacaggtattacgtatcttctatgtgctagttactttggggatacccagatgagttaaacatggtctctatccttaaggattccagaagttgctatcagaaagagttaaaaatcattcttcaggtagatagctcaaactaaaaatacctgttattatggccatcactccggcttaccatggcagataaggctgaaatttgtcccagataattggcttcctggtgagctttctccctccttctttttcactgagtatacgctaatattcctccagtattcatactgcatggtgaggacagctgacggtatagcagccagggaaggctgcacctgtgtttccattttagcgctttgatgtgctgcatgcggttgccctgcaattagttcatatgcgtgaatcacaatggcatatgtaaaacgtgtgctcatacagacccctctccaaagacctcacgcatcctttgcttctggagagaattcccctgaatgtatgtgatgaggaagttgggcttttcctctctgtgccaggctgaagcgaggggctttgctcaaggtcgtatagaaagtcgtctgcccttccaggccgtgctcttccattggaggcaacacctgggcgttctttgttttgcctttgccgcagagggagaaatgtcatatctttcaaaattccagtgtttcctagtcttctttgagaatgcccctgttaagataggtgagaagcaccaggggtaggcgagattcttggataatgtgtgtcctggaaggtggtgtattctggaatggggatgggaggaggggaaaaggataaagaagggaattcttttcgtttcaagcaatagaaattcaaactgtgatgcctcatggaaccagaccatgagaaggtcatgagcgcctggaactaagatctctcgagtgctccgggacgcttctcgcctcgtctcttacgtgtgcttcttctcacattttggcttaattcttcatttcaggccagctttctctcttacagctgccaccagcagactggacagactcctgtcctctctggccctaaactcaaaacttccaggagggagctcagatgagcgggcggttgggggtcaggaagcggctgctcagatgaagggggtgctggggttggggtgctcaggagcatctgcctgtgtggaagacgctatcctacaagaaggctggaaagacagacaaacgtcaccccctgcattttttgatggtttgtaggaagtgtcagtgagcatttaggagaaaaacccaagaccaggttacacagagcatgtcaggtctcaaatcccgacatgactcctgtcaaacccagtgccagggaggaggggagcccttcacccaatccgtatttaccgagcattgactgggtgcctgtgaaatgaggacttgggggggttcattttgtggaccactgatttcacaatcatttagcagtttccagggggagaaaagtggcctgcgtattcaacagagcttagagaagagactgtgtagggatttgcccagggagtgcagtagggagaggtgcatcaccaagaatatcggagacttctccttagcaggctcatcgtttccaaagagatggagatgcagtcccgagatagcgctccggcttgctggggacactggctccaggtggacagtcttacgtctgcctggcaatgctggctatgctggctatgctatgacctgcttcctctgtgaaacagctgctgaacaaaaatgcccaaattttagcacatcaatctcttcttcttcctcctcctcctcttcttcttcttcttcctccttcttcctccttcctccctcctcctcctcttcttcttcttcctcctccttcctccctcctcctcctccttcttcttcttcctccttcttcctccttcctccctcctcctcctcctccttcttcttcttcctccttcttcttcttccttctttcttctttcttcttctttaagaaagggtctgcttttgtcacccaggctggagtggagtggcgtgaacgaacacagctcactgcaggctcaacctccaaattcaagcgatcctctcaccttaggcccccaagtagctgggactaccagcatgcaccaccacgcctgggtaatttttgtatttttttggtagagatggggttttgccatgttgcccaggctggtctcaaactcctgagttcggatgatttgccggccttggcctcccaaagtgctgggattacaggcatgagccactgcatctggtgtttttgttgttgttgttgttttgagatggaggtctctgtatcatcaagaatggtctcaaactcctgggcttaagtgatcctcccacctcagcctctcaagtagctgagtttacaggtgcaagccaccatccccagccaagcacattaatctttatgaaaatgttttgtttctgcctttccccactcttgcaatggctcaccacagtcatcccattttcccagcagcgtggaactcacagtcagaagggcccattctccaaaattaaccccacctgagagttacattatgtaacacactgggagtgggggacaaggaacatctgtctccatctgtgccaggtgctaacttcctgtgtcgcccaggaacactcacctaacacctccgagtgcctccacaaaagtgccaggccatgtatgtgggacacttgctctgcagtgtaagcaaaaatgggtgcagttttaaaaatattgtagaattctagaactttccaaataagttggataatatcagcagttggtattcatataggttgaccttcacttggcagaacagtctgaacaggtgcgtagattttaagtagacttgaatttgaaggctaaggtcatccagatctctttgcggatgtggagctggaatgaagccctcctggctttgcctcctctgccgtcgtcgcagccggcaggtcccagctctcctctttcaattgctgtgtgaccctacggaagatattcagtttttctgggcctgaacttctttatctgcaaaacaggaaaacgaatcatacttcctcagagggtaattgtgaggctccaataactgtgctggagaaagtggggtatgaggcccggtttggggctgtgggagcacctcttccttctgttggtcctaggagctcagcgcttggtgggatgttccagaccaggagaggctgggactaaaattccagagtgatctatgggtgcagaagcttcagacgcctgttcaagagatgggtatcaggtgaggtgagtccatatttaggtctccagctaggatttaaacctataaggggaagaagcacaggtgagctacagtaattttggctaaaggtccaaactgaggccaatctcagggcatgtccctctaactagaggtaaggcatttagtcaacagccctccaagctcaaataggcagagggtagaactgagggggaatagcagctgttactaggaggctggtcactggcaaccttgggtttcaggagcgagaaatccatcctggatactgcgaacgcccttgattcttagaaaagtagggtcctggcatcaaagctggagcagtatggaacggatgactgcttagacacagggccagtgggtgatcaactacagcctcgtagatttctctttggaggactggagtgactcccaggctcagtaggggactctgtaggggactgagcttggagaagcccacggccaccctgcctccattccaaacaagattattcactccactcctgtttagctggtcacatggctcccccattccttgctctccattgcccttagtccaaagtccaaattccccagcccaaggctgcagggggctggctccctggcctctagttcctgcttctctcgcctgcccccttgactccagtgagtagtttttggtgctgcaaagaggacacactttctctcaccttcgggcctttgacctgcccgggcagggccctccccatcttcctcctttgctctgaattcatccttcttcttcaagctttaatttggatgttatcccttcaccccgcttccccaaggaagttccctcctgcccctgaggcctcttgccatgctgggctctaagtgggcatttatttctctgtgcagagtttgtccttctttgaaccaggtccctcctggacaaggaaggtgctagatacatgtttgtctagccacagggatcagagctcagaaggttgcggggacagggcatcctgcctgccctctctgaatgttcactttgagttacttcagttactctttacctggacaacataacgtcggggaaaactcatttatttgcaaaaggcaaaatacatgacactgtttcactcagaagcccctcagacccagcatctcgccaacctttgggcttaagaagtggtgaaaagatggggagagagtgactgaatgcatttttctgtctaggcaatttagtattacaggagatgctctcaaatccttgaccggagtgaaggcagagttcttgtcagttatgtaagaaaaacagctcattgttatatgatgcacactgaacaccatcgtgtgttttctcagtctttgtgtgtgcggacacgtggcatttaaattaaaatttggccaggcacagtagctcatgtctgtaatcccagcactttaggaggccaaggcagaaggatcgcttgagcccaaagttgagaccagcctgggcaacgtagggagaccccatctctacagaaatttaaaaagtagccagccatggtggcacacacctgtaatcctagctaaggctgagacaggagaatcacttgagcccgggaagtctaagctccggtgagcctgtgattgtaccactgcactccagcttcggccacagagtgagaccctgtctcaaaaatagaatattaattaattaaaatttaaggaattctgtttttactacggtgagtaacaaggttttttttttggtttttgggtttttgtcgagacggagtcttgctctgtcgcccacgttggtgtgcagtggtgcgatctcagctcactgcaacccccacctcccgggttcaagcgattctcctgcctcagccttccaagtagctgggagacaggcgcacgcccccacacctgcctaattttttgtatattttattagaggcagggtttcaccatgttggtcaggctggtcttgaattcctgagctcatgatccacccaccttggccttccaaagtgctgggactacaggcgtgagccaccgtgcccagcctatttttgtttttgtagagatggggggtcttactatgttgcccaggctggttttgaactcctggactcaagtgatcctcccacctcagcctcccaaaatgctgggattacaggcgtgagccaccacacccagcctaacaaggttttttgttttgctcctgtaggtctattttttttttttttccaatcagtattttcaatgttttggctccagacagatttcagtggtgcatcacatgttaccgacgtgcctcccgtgcctccctgtctgttcatctgctgtcgtctctgccagggatgctcgtctctcattcgtttttttggcgtggaaacacgctgctcagtcctcaggcccagctcccgtgtcacctgccacctgcaggccttcctcttgtcccttctccaggcactgtgcctgtgtcccctactccagaccgtgagttgtggatgaaaggggctgtatcttacttgcccctttttgcatttattcatgtggatacatagatgctcattcgcttcaattcattgaacatctgctactggccagggactttttcccttttggaaggagacccagataccctccagacataggtccggcctctcaggagttttcattctcctgagagaggagagagacttgttgagctatgcgtggagtgctgcctgacagcttgctattttctttctttcctgtgagataaaaatgtaccttatggtattactttattttaattctgccatgacatttgtggcggttgttttaagattcagagattactgggtgttgatctccttatgatactctcggttcctaattatgttagaaaaaaaagcaaagcgggaacttggcttttgtgttgccttcacagagtgtggaggttgaaaacatctcagcgcacttcacggaggttctcagagaccccataagtttctggaaaagtgggaaacgcaaacctgtcaacctgtcagtctctcccctctcacggaagcctgacatgtaaatctcaagttgttaaacctgctgtcaaatgagctgcctccactgaagactcccctccgctcctcgcactctcatcactgcccctcactctctgtccccacagcacagggacagcctccgcagactcccgtgtgtgtgctctggagagaaaagattctggatttgggcggtctcacctccaaaattgcagcccctaaggggagccgtgctaaggtgtgatacaggccatgccccttctagccccatgggacacctgactgatagcagcctgtgcagatgtgaggaacagaaggtggccccagaccccttaggagaaaccaaagtgcctcagagacaggacaagtgctaccccggaggccagtcaccaggtgacctgggagctgggaaccttttcagcctatgggtggctgtttatcacgaggggcattagacagacaggaggcagtgctgaaattcaacagcacaaagcaatttccagcttcatcttggcttattaataatgaaacagcaatagcgcaggcacaaatcaacagtaagtaggtgggtgggtgagacaagttggacatttggggaacagcctgggcagctaccgatacagagggaagccatttggtgtgtgtacctcccctcttccctgggataggagcaaacctgaaatgagaacggcagtcatctgcacacaaaaactaggttaggaaactgttttctaaggggccaggttgggtcactctttgtgacaagaaccgtgtgaaccacttcttacctgtaattctgactcagcattgatatttgaaaattcttccctagggctgggtactgagtactgttctgagtgcattacatacaacagctcatttacatacgtaatacattcacatacatcaatcatttgcatgtatcaactcatttatgtacatcaactcatttgcatacctcatttcatttgtacataactcatttgcatataccaactcattaaagttgtctcttttactagtgaggaaactgaggcctagagagtcatgtgcatgctgcatctctgcatgcttcctctgatggtttgatgtgggtcaatcctacgtctgtgcacatcttaacaactatcgtaggtgtagggtgcctttggtttactagaggtttcatcagtccacctgattctcactactgacgtaaatgtcagaggtggtcctgcctcttctcagtctccatcccaaggctctttacagctttctgtggcctgattttcttgctgtggatgctgaagggcactcttcagtggtttctcccagggccgttgcggattgcagctgtttcatacccagatgacctggggggcatcttcagtgtgtgcagatcagactcagcactgatactcgtcctccagccgtactttgtctccgcggtggtgctcagacttaaagcacttctcagctgtgctagtggtcccttcagagaacgaattatgctgaggcagagagggacctggggagggtagggaaggtcacaaattaaacagcagattagaggacagaaattcggtttgtggctttaatattttatactcagtatgacaggcagactcttcaaaaaaacataacctagtggcccaaatcgcaattttacgttatactttcaatataggaggaccctcacattgcttaaaaggggtcttcagggagaaatttacccaaaatttcatgcttggctccgtggtgacggcacatcctcactctgagaaccaggaccggcctcgggagtccaggttctgttcccagtttgtatgcacaccgatttccccactgtctgtcacaaccagtcaacttcccatgtgttaacagttactgaatctacctgtccgcacgtggccaagccccgccccccccttcccccatgctcttctctctgcctggccaactcctcaatcttggcaaagtccttcagaacccttgggtagtgtgagttaccttcctttgtatagaatctgaaaaatcattgccctttttttattagagtcaggatctcattgctctgtcacccaggctggagggcagtggtgcagtcatagcttactgcagcctcaaactccggcaggtctcaagtgatcctcctgcctcagcctcccgagtagctgggactataggcatgcgtcaccatgcctgactaattgtgttattctttgtaagagatgggctctcactgtgttgctgaggctggtctcgaactcctggctttaagggaatcctcctgcctcagcctcccaaagtgatagaattacaagtgtaagccaccacacttgtccatcattgccttttaatctttgcatcctgccacctccccagcacagccagcataggagccggcacttagtacatgtttgtttggggaatgaatgtgaggtcactagtcaatgattctgaaatgagtctattgaaggtggaaaccagcacaattcaaatgctttgcgttaaatgccagtcagtgtctcttcccaaagacccccactgaacccatcagatgtaaaatcccccattttatcaccgaacaacctgtttccacccatttcccttattcactaaacaacccgtttccacccatttctcttgttccttcttattgcagtgggggacgtgtctttgccttctttcaagggttaatgtttccaagtgggttctatcttctcaaggatcactggtctttcgcatataccctcttgctcccgaatcattaagaactcctgcccattggatgatgttgctgtatctccaattatattttgaaactttctccctctcacttactcctccacgtgtcccatttctctgccttcttaatggccacttctcaaacacatggctgacagattccggaggccttcaactcccacctatgaagcagccagtggcctcgggagtggggctgcttgagactgtgggaacgatgttttcgttaagaatggactgcctgtataatggtggtcccataagattataatactgtgtttttactacaccttttctatgtttaggtatgttgtttagatttagaatatgtaacgcaattaccgctgcgttaccagcaatcccaagaggaccccagaccctctgaaggaagcgggctcctgcaggacccgggagacagtgttgaacttgaccttgctctcctcctcgggtcaggcctgccgaccctgcactacaggttcctttttctctccctgtccgtgcatccatctgtttctgcactctcttcggtgcatcctctgaaccaccagaattaggttcctccacaccaaatgtgatcatttcatttcgcagctagattgctcgtgaacagctaagcaggtcacgctgagctcgacacagtccaatcccaagtaccagtcaggctcccaccgtcccttcctatcccaaaatgtcacctcccctgtgttgcagccacactgaagcctcaatgtcccctaaacattccagaccctcttgtgactctgagtctctgcccctgggttcacgccacttagaatgagcttccccccattttctgcgatacacactgtcactttccctgggaacagattcgacctgggcagaatgctcttcagtttgttcctatctctgccgggatctatatgttctggactctcttctacgacacggagacctttcccggagcaggaacggggccacggccgtgtttgcattttctgaacccaggatggtgccactgtggtttgttctccccgttcaagtgttgctgactggtggggagggacagcatcgcctcagtgaaagttttgggttaaacactgtctgcagtaattcaaaaggataagaaggactcctttcactgtgcatctttagacgaagcatcaacaaaggctttttcactgaaatccaaactcaaggtgtatacatgtcacctcccagcacagcaaatggcacagactcgagggaatgttttccttccggaacaacattataaagcagcagcccccagcctgtaggcaccagggactggtttcacggaagacagttttcccacggaccaagggtggtggtgggggatgatgatttcaggaagattccagtgcattccatttatcattagattctctcaaggagcgtgcaacctagacccccacatgcacagctcacaatagggtttgtgcttccatgagaatctaatgctgctgctgatctgacgggaggcagagttcaagtggtaacgcttaccttctgctgtgtggcctgcttcttaacaggacaccgactagcactggtccgtggcctgggggttagggagccctgctctgttacagagaacaaaatttgttacgtagggatcacttgagcccaggagttcaaggctgcaatgagctatgattgtgccactgcttttcagcctggctgagcgagaccctctctataaaaaatttttttaaagagtaaaatttgtatagtttttgggaatttactatggtgatattttatagcgctgtcaggaatgctctagctattggtgggccctcagagcacagtgaattcgagggctctgatgtattctgttgttttttttgggtttttttgttttttttattttgagacagagtctcactctgttgcccaggctggagtgcagtggcaccatctcagctcactgcaacctccacctcccgggttcaagcaattctcctgcctcagcctcctgagtagctgggactacaggcgtgcaccaccacgcccagctaatttttcctatttttagtagagacggggtctcactacgttggccaggctgctctcaaacttctggcctcaagcaagttgccctcccgggcctcccaaagtgctgggattacaggcatgagccactgcgccgagcctctgatgcgttcttgccggtcatttgtacagtgttgcttgcatgtgagttcttcttcaggtcgagattaagggtatgacattagtactaaccattattcaacctctgaaatatacgcacatgggacaaaggagataatttcatttacttatgtggccttactttgaagatattcatatgttagtccattttgcattactataaaaaatacctaaggctgggtaatttataaagaggtttaattggctcatggttctgcagctgtacaggaagcatggtgctagcatctccttggcttctagtgaggcctcaggaagcttccgatcatggcagaaggtgcaaagggagcaggcatgtcacatggcaagagtgggagcaatagagagaagggggaggccccagactctttaaaacaaccatttctcacatgaactaactgagcgagagctcactgatcaccaaaggatggtgctaagccattcataagggatctgcggccatgatccagtcacctcccagcaggccccacctccagcactggggattacatttcaacatgagatttggaggggcaaacctctgagccatatcaccatagttagtgcatgccagatgatttttgcgtttcccacaggatgtcagtgagcctttttctcagtcatggccagccccaacagagaggcaagatgagttcctcttggttgtgatgcctcttttcttttcagttcacactttatgccctttggcttgctgccaggtgctacctttcacccaaaagaaccacaggctcctcacggattttgcattccttcagggtcctgccagttactggcaaattcaatgataattgtgctcactgtataaaatactttctggaataaggtaaaatatgaatgaaaaaatgcacaaatgccaaacaaatacagttgcttgtgctgagattttgttttaaagaagaaagagaaaaacaaagaaattaaggacagcattgcgatcacttttcttcctccaaacaaaagctttcaagcgcaacatgttgatttttaaaattcctttctgggctgggcgtggtggctcacacttgtaatcccagcactttgggaggccaaggcaggcggatcagaagatcaggagttcgagaccagcctggccaacatggtgaaaccccatctctactaaaatacaaaaattatccaggcatggtggtgtgtgcctctaatcccagctactcaggaggctgagagagaagaatcacttgaatccgggagatggaggttgcagaaagccgagattgcaccactgcactccagcctgggtgacagagtgagactccaactaaaataaattaataaatacatgaataaataaaaaaataaaattcctttctgtagccactgtgagccaaaagcacgggcttaaactgcagagtgctgtgtgtgcactcacaaatcccaggttcccagagtggagagccctgcaccccagccgcggccaagggtcagaagtagcaactggtgattaatcaagtggctcctgtcttaggacagtcagcgtttattgtctctgcaggccagactatagaaataagcagacccacaaaagccagcaattaatatttccccggagagattccagatgctgccgggtggactgtgacatgctagcattcttcctgctcctgatttattccattgtgtggaagagcttccacagaaatgactctttggatttttcaggaaatgtttcaagccttcttattcagacaccctttcagcgtccagtgatggacgaagctgtgccctagagtcccaccttcccaaacagtgggcaacttgctttctccagcctcctgtccccttccgagcacccttcacccctcccatccccaggagtcgctgaataggtcccatgggagagaaatgacagcttgaagtgatgacccatcccaccccatcaaatgttggcattttactctggcctccaaaggcatggggggatgacccatggcaggaatacaggccttacagagaggttcactccaaccaaaccatgctgctcccccagtggcccaccatgaaaacctctggaaaaccaacttatttgccaaatgactcccatgagcaggcctttgcaaaatttcagagtgttgtacagctgcatcccaggacaaaactctttcttttcagtactaacagtgcaagtagaatagggtcgtggtggagcatcccattgtcttcattcctggtccactaattttcatctgagttaagagttttgggtttgaattcaagggaaatgaaaagttcttaaaggggccgggcacggtggctcacacctgtaatcccagcactttggaaggtggaggcaggcagatcacctgcggtctggagttcaggaccagcctggccagcatggcaaaaccccgtctctactaaaaattaaaaaaaatagccggggttaatcccagctactcaggaggctgaggcaggagaattgcttgaacttgggaggttcagtggaggttgcagtgaggttgcagtgagccgagatcatgtccctgcactccagcctgggcaacagagtgaaactccatctcaaaaaaaaaaaaaaaaaaaaaaaaaaaaaagaagctctcaaagggcctgagccaggcaccgtggctcatacatgtaatcccaacactttgggaagccaaggcagcaggatcacttgagctcaggagttcagcctgggcaacagagtgagactctatctccacaaaaaatgttttttaaaaattagccaggtgtggtggtgcatgcctgtagtcctggtgggtggccaagtcaggaggatcgcttgagcgtaggaggttgaggctgcagtgagctatgatcatatccctgcccttcagcctgggcaacagagtgagaccttgtctcaaaaaggaaaaagaaaatggcttgaaaggcatgtgagacattacatagtttgaggtatttcctttgctatatgcaaaggcataaaaatgaacagggagctagcggtttattgctggtccgaaccagcaacatcacagctggccctgggcgtcacagggtctcatgggggtaccttaagaggattcttaaatgaaactcagaacacagagaagtagttgattttgtgtcttgcatgttctgactcttcatttagtgtcacagcaagggtcaaggatatgggaaatcataaacaatcccaagagtttcatgatctttgagaatcttaaagcttcatctaagctatgcttttgaattgggcagaaccagaatggatacaagatgaatacagttcaaatgattctaaaactagagattaaatcctgtgaatttcctactctcagcaggaggagattacaactatttccaggtttaagatgatgaacatgattggttttgccccgtgctcactgggctcagatgagaaatagctttaaggtgcatccagggtttggttggttgtgaagaagaatattccttgtcgtcaatgaataaatgttgtgataggtcattagaggaggatctagagccctttgctggaaattgtttgaatttgaagccagagaagtaagcaagtaaccactttgttctccttctttctctttgtttactccattgtacattgactgtctcccaaagtatcccaccgagccttaagaaaaagttccccttaaagataacagaactggaggattcagctaggggctttttgattagtcaagaagcctttgattggatggacatgtaatcccagcactttgggaggctgagacgggaggattatttgagtttaggagttcaagacaagcctgggcaacatggcagaaacttgtctctacaaaaagtacaaaaaaattagccgggcatcgtggcaggcacctgtaatcccagctactcgggaggctgaggcagaattgcttgaacctgggaggcagaggttgcagtgagccaagatcctgtcactgcactccagcctgggcgacacagcgagactccatctcaaagaaacaaataaacaaacaaacaaaaaacaaaaattagctggatgtggtggtgcatgcctgtagttccagctactcgggaggctgaggtgggaagatcacttgagtccaggaggtggaggtttcagtgagccatgattgcaccactgcactacagcctgggtgacagagtgagaccctgtctcaaacaaaacaaacaaacaaacaccttgattgatgatccaatatagttcttttgttgttctttgggccttcttttttttttttttttaatgatcacttatctttcccttgagggaaacctacgttgtaaatagagaattttttttttttttttttttttttttgagacggagtcttgctctgtcgcccaggctggagtgcagtggcatgatctcagctcactgcaagctccgcctcctgggttcacgccattctcctgcctcagcctccggagtagctgggactacaggcgcccgccaccacacccggctaatttttttgtatttttagtagagacggggtttcatcgtgttagccaggatggtcttgatctcctgacctcgtgatccacccgtcttggcctcccaaagtgctgggattacaggcgtgagccaccatgcctggcctgagaaaaatatttttgatttccactttatagatgagagaattgaaattcaggttaatgatgccactcaggcttgaaacttcagcatcatttttgtgtttcttctgcacatcccacattcggtccatcaccaaattctgttaattttttcctcgtgatgttactggcatctgtctttttctcatcacatccactgataccaactggggctttctggatgattatactggatttttccattaccttccacatgctggtcttacctccttgatgcctcccgtaagtattttggatcttgggaatatgaattcatgtctgttcccttcgtttggcacccccatgggttgtgggcacagaggcagggaggctctgagaggcatgggccaggaaaggcttttcagagatttctgagcatacctgtgtcccttacaccttattctaattcacaccagctcttggtgtttgctcttcgactgtggacctctgtggatggtagacaatttgtgtgagtccacgagcccttcagtgttaaacatcattaaacataaggtcgcaaaagtcagctgatgctcaaactgaaattgttgtattttgttttgttttatgttattttgtttcccagaatgaggatatattggtcttattgtgctatgtgttagagccacatattctttcttctgattctgtgttcacattgccttccagatatcatcaaatctaacatgttaaaatctaacataatgagtgaaaatatatcagcgagaatgataatagtatctgctttctaatccatgtgttcatcatgggaaataacaaagctgcatcatatcctgtcttgtttctatcatgtcctcttctccagttagatcctaagtccctccatgacaaagacctggattcgttcacacatttagtgattcagcaaaacacctagtaagtaccccttgtgtggaaagccctgtacttgcctttggtcctatgggagttgcgttgcttgatgttagtgatgtacctaagggtggtgttaggactgaccggggctcccctcccaagccccacctatgtttttaatcacaataccatgcaacttccaaatcaacgctgttgatagaaagacacctacccagctctgaagagttatttggtccctagatcaaggggcagataagtcagatttccagaaagatagagcctgcctctttgtcattccatctccactattccttcactgatgagaaagtgatcagatcagaactgatgttgtataaactgctctgtaattcctgcctgattggcttttcttgagaggtgcctgtccattagcttttgccttccttttgtcaggctctctaaacactttaagtaacagaatcaattaagccttcctcacgattttagaaaactaagtggtagctcaggaggggagtcatcctaacaagctgtctgtgtagacagtggattctgtattgtcgcttttgtttctcaaaggtttgggtttggtcagaggttaccaaggaaccttcgctatatttccacagattcttttgtgagcctctagttcacgccctgtaaggacattcatccttctctgtccttgggagacgtaggaaaattatttcctggagaaatcaggcgcttgtaagagccagcctttcaaagaggtatctaccatcaaaggggctaatcgtccgagtgacagacacgcatggctggcttccctctttactctgccttgattgagacaagatgagcgtgctgctggccttagcaatgggggattctgttagaacaatatcctcagggaatagcttttatctgctaagtatgacaagtgtggcaactgtgcacagagtccagatctcacgacctcgctttgcaaaggctacaagaccaagggcttgtgtacctgccccaacagagacaggctgactcttactacgtggccgtaggaatggtttgcccttgctcaggacttatttacctaatgtcgtttggcctggaatgtttcagagcaccctttcatgcctggtcagggttgtgatcccttttggagacagaaggaggtagacgtgcttttgtgtttccgacactgaggacattgaggttctgggggattcatcacttagctcccaactcttattgggagcagaagtgccactggagtagggtggctggtttgagggtgtggccccgggaaaggtggcaggacacacttctcttgttctccagcccattttcaggcacggtatcctgcgctgctagcaccgtagccatcactgacctcaggaccctcccggtgaacactcagttaaaattcctactcgctgcagtgggaaattttatgttatgtgaattttatctcatgattaaaattaaaaatgaaattttaaaaatgaaatattcagttgcctttcctagaaggaatcatcccgatgatactattccttacttctcacattcatcccattctaatgcccacatttacttcataatgtattacctacgtatagtgtatgttgttcgcttcatttagcatgaccctatgaaatgcctgtgtgaccaaaagcagatcaactgataaggccttttgtggctcagatgtgtctttgcggggaaatggtcaggcgtcctctgttggcaagggcacctgtcccaagcagaaatggagaaacacgtcctcacctcctcctgccacctgctctgaacagattctgtagcgtaaaattctttataaatacacatatcaatggagttcttgacattttgcccagaacctgaggaagaataaaacctttcttgtccaactaaaacacacacggaataacaagcaaaagcaaaagagaaatcccaagaaaacagaccagaaacaaagggttatgctccgtcattgtccccaagagggttacacatgagactcacagggcaaattttatctaaattaaaatgctgatttttcacattacaggcccaaagtttaccgaggtcacagtgcttttaaaattaatgaggccgggagcagcggctcacgcctgtaatcccagcacttttggaggccaacgcgggtggatcacgaggtcaggagtttgagaccagcttgcccaacatgacgaaaccccgtctctactaaaaatacaaaaaattagccgggcgtggtggtgggtgcctatagtcccagctactcaggaggctgaggcagaagaatcgcttgaacccaggaggtggaggttgcagtgacccaagatcgagccactgcaatccagcctgggtgacagagctagactttgtctcacaaaaaaattaaaaaagaataataataatgagtgaagattagcttcctctgaagtcagttccttgtggatcatcttattgcttattttttaacttatttgatatctcactgacccctcccgaggcagaaatttgcttttgctcattgcaaactggccaaggaaaaaaaaagaacaatttcctctatagagtagttcccccttatcctcagatagccttccaagactcccagtgaatgcctgagacctcagaaagtaccgagccctgtatgtgctgtttttctgatctggtaaccagggcggctactgagtggttaacaggcaggcagtgtagacagcaggaggtgctgggcaaaaggaagactcacatcccaggcaggacgaaatgagatggggtgaaatttcatcacactactcagaatggtgtgcagtttacaacttatgaattatttatttctggaattttccacttaatattttcagactaaggttgactgtgggtaactcaaaccttggaaaacaaaaccgtgggtaagggaagactgctttaagatctgagaatgaggactgacatgttttggtttggctggtggtttcagatccaacctcagtagttcctagagaccatttaatttgtttttgagatggagtctcgctctgttgtccaggctggagtgagtggcgtgatctcggctcactgcaaactccacctcccgggttcaagcgattcttgagcctcagcctcccgagtagctgggattacaggcatgtgccaccatgccaggctaatttttgtatttttggtagagatggggtttcaccttgttggccagactggtctcgaactcctgacctcaggtggtctgcccgcctcgacctcccaaagtgctgggattacaggtgtgagccaccatgcctgaccgagaccatttaatttgaataagtgcccaagaagcaaaggactgagccaggcaagatgatctgagagcaggaaggtgtggccaggctggctgagccatgaacaggctggttgctccagggccggtgtctcccctggaaggttctggagttcaggctgtgttggagtccaccttctgcccctcaagtccatggcagggccgttgactgctgctcttgcctgagtctcctggttgcaaaggccaggcaaggcactgcctaacgttgtgactaacatcgtgggtgtgacggggagtcagggtggcttctctgttgccccaagtatgccctgcacatcaccatcttccttttcaaagaatggtgaaaataggaattgtgctctttagggaagattgtcttttttatatctttttcttttttttttctttttttttttttttttgagacagagtcttgctctgttgcccaggctggagcgccagtggcgcgatctcggctcactgcaagctccacctcccgggttcacgccattctcctgcctcagcctcccgagtagctgggactacaggcgcccgccaccacacccggctaatttttttgtatttttagtagagacggggtttcaccatgttagccaagatggtctccatctcctgaccttgtgatccacccgcctcggcctcccaaagtactgggattacaggctcaagccaccgcgcctggccttttatatctttttcaaagaaaaaggtaggctgggggcggtggctcacgcctgtaatcccagcactttgggaggcagaggcgagtggatcacctgatgtcaggagttcgagaccagcctggtcaacatggtgaaacctcatctctactaaaaatacaaaaattagccaggcatagtggtgcacacctgtagtctcagctactcgggaggctgaggcaggagaattgtttgaacccgggaggcagaggttgcagtaagctgagatcgtgccactatactccagcctgggcaacagtgtgggactccatctcaaaaaaaaaatgtagaaaaataaaaacaatcatctattcatggctaggtagaggtcagatttcactcactgacctgtttttagattttccttcgatattccaactcttagatatgtcaggttgctggagttgctgactgcactaacttctgcattctccaactttcccctcagagagtggcttgtctaaatcacccaaattaccatgtgggtgagaatgttggggaaatgaagatttaaaatccacaatattattagtgctgtcaatatcataatatcataaatgtccatacgaggaaaggagaccttggcagaggctaccttttctatctgttttgtgtgtgtgtgtgacattcttcatgaatgacttcttgaactatgaaaatgaggcaactgtggcctgaactctctcatttgcctcctccccttcctggcatttacttaagacatttcctgatgcttcccgggggtgtttcatgctggtgtctaagccagagatcacacctcccacccaccatgcctgcacctccactcctgcaaaggtttttagagtcagggtccctatcagtgtctaagcatcaggctcttcagaccctgacctttgaaaagtccaaatggctcttgagtgccccattttctcccaatctgaaaactgtaagaatgaaatataacaattaagcctcagaggatcacaagcgcaggtgatcctcatgagcccagactgatatttctaaattatctagatcttccttgaacatagactccagagttaccgggacgcagcgttcccattccactgggcagccatctatacgtgaagtgtcattgttggtggtttgggagttttattttccctttcataacacgtctcctgtctcctcagctcccccagaactccctgtaatcatatttgctatcagttgtgtttgtggaggtgtagtgaatttttcagggatgaataccaatgctgagaccctccaagaagacctgtgaggtcagcctctgtcagcgtgacagcccagtgggagggggccccaagctacacagcaggagatgattgtcacacgtcctggtgagagagcctgctcaccagctctggacctgcactccgtgtgcctggccagtagataggtttccctggtgttccccaggccttttctgcttcatgacattgattatatagctagcatttcatttcagtagggcttgggaaagggggttctttattgcagctcctgtaaaaacccatttccacacgaatcacctctggcctttttctgtctggcacattgtttagacaggaggggtttgtgtgtatcacttccctccagcctctcctaagtggaagcctgggatttggaaattgggatttttttccttctctctaaatgaatgccttgttggataccttgttgataaaatgccatttctcacatctttatagcttaaggggctaccttagccacaaggcacagtcccttattactgataagagctactgtcatttcacttatatactttgggagattcatttttgcttctcagcatcatttatgttatgattcatatctaaatttaaggtaaaattttatgcttcaccatcgacttttcaaagtttgtctttgaaaatgatttttaaaatgatctaatccaaacctctcagtttacaggtgagaaaacaaatctagggcagagtttttccacaggggcacgagtgatgtcatggaccagatgtttgtgtcgtagggggatgcctggtgcactgtagggcatttcctgggatctcaagcttctatcctctggatgccagtagcaccctccaagttgtgaccaacaaaaatgtcccctgtcacacagctaagtcataacagagtcaggcataagacacgggtgtcccgactcccccatctgccctttccaggttgggcaacagaattaagctctcaacccacacagagctcagagaattagtcaagagcacttccacaatctccagggagagaagagggtttaggagacaaaagagccaacagcatggaagagctttgtggaactctgggcgatgcatcccctacatggaagagctttgttgaactccaggcgatgcttcccctatacggaagagctttgtggaactcggcagtgcatcccctacacggaagagctttgtggaactccaggcgatgcatctcctcaccggaagagctttgtggaactccgggcgatgcatctcctcaccggaagagctttgtggaactccgggcgatgcatctcctcaccggaagagctttgtggagctccgggcgatgcatcccctcaccggaagagctttgtggaactccgggcgatgcatctcctcaccggaagagctttgtggaactccgggcgatgcatcccctcaccggaagagctttgtggaactccgggcgatgcttcccctacaaggaagagctttctggaactcggcaatgcatcccctcaccggaagagccttgtggcactcctggcagtgcatcccctacacggaagagctttgtggaactctgggcaatgcatcccctaaccggaagagctttgtggaactgcggcaatgagtccactctccccagtctccctgtctacgaatagaacttggcccagtgagtcactgactcaacttctgtgatcttctactagacgatatggtttagaaattcataagatgtgtgtcaggagttaacaggtttaggggaaagaacagaagaggcggaggaatgtctccccatgaatgctgaccctccacatacccagaacctgggactagccccttggcaaagactccatgagcctcatacagtgaatgggactcgttctcagccaggtagacatcagcttgggtctgacccccatccttgtgtgcaagtcctgattcacagagtttctttggcacttttgcttaagctgtaacaaacagccagtctgcacagggctcccttctgtctttccctttaagtcggctcacatttctctcctggtcacagctgtagaggacacacacagcacgaaacatgaggagtgtggcaagtaatgaatgcccccagggtattgccactttctgacagatgaggacaaatgtaatttccagggatttcatagctgagagattagaagctttcctgctgggcctaattctggagccaggtatgaacctgtgtttcccttgtataaaggtaaaagaattctgttactggggctgtggatggagccgattttaacatttgttttttgagctccatctatagctcgtaaggtccaccaggctggtccaaggtgcctttcctctagacacaggatttcatttagtggctgtgcctacatgcaaagcagcaacttcattcaactctctgggtctttgtcttagtgatgccagaaataacaaaatagaaactgaactattacatgaaatgacttttgggttggaaaaacaggctctaagaacagagttaatgaactgagagaaaatagtttctggttatgctactagaaactgtggtttttatcctcataaatcattgctttagggaaaaaaagtcctttctaaacttttcctgtcctgtttccttttcattttttgaatgaatgaacagtagggtattctctgtctttgagttattttcttcctagccacctggtcataatccagagggaaaaacaaattagatggattctgtgagctatatttcattgctattggtgtgtggatcacaatgctttattttccaccagttaaacgaagaacattctggaaactttgcacaaagaaaaattagtgtttatccctacagttgaaattttctaggaaaaaaaaatagcaacaaattaagttttgaaaaaggagagccaggtgcagtagggtgcatctgtagtcccagctactcaggaggctgaggcgggaggaccactgcagcccaggagttcaaggctgcagtgagctatgattgtaccactgcactccagcctgagcgacagagctagactctgtctctaaaaaaagaaaatttaaaaaggaggcttggctgggtgcagtggctcaacgcctgtaatcccagcactttgggaggctgaggcgggtggatcacctgaggtcgggagttccagaccagcctaaccaacatggagaaaccccatctctactaaaaatacaaaaaacaaacaaacaaacaaacaaacaaacaaacaaaccaaattagcccggtgtggtggcacatgcctgtaatcccagctgcttgggaggctgaggcaggagaatcacttgaacctggaaggtggaggttgcggtgagccgagattgcgccattgcactccagcctgggcaacaagagtgaaacttcatctcaaagaaaaaaaaaaaaaaagagctttgattttcatgaataccagtctatttctgaaggtttcccccttggaggaacagtggtggcgggctggccctctcagtcaaggagacgtgagcattccatgagacacgggtttcctctagggtctgcccctgaggtacctgaggtttggatacctctgcccactcccctctgccatgtttttccagctgtaccgtgccgataatcactgtgtcagctgtcattaccataatgctctgagcataactgctgtaacagctgggaaagaactctgcctttgcaaaacaatgctgcgtcataacacgctaaaacccccaatgtgcccacccaatatttcctatccatttgccccttctgcactccacaggcatgatcttccctttgccagtgggacatcagaatgagactctcttctgtcctccctctccttccccaagaacagtccttgcttgcaaatgcaaacagagaaaaagatactacccgagtgagcaggtgtttccgttggggtctgacaggagaaagacaccacacttagatcgggactatttagaaaagtatggatggagtgtagaaaatgaaaagggctaattagatagaccagggctagtcatagcagagtgccaggatggcctaggtccgaagggtcaaaaggagggaaccatgttggggggacagaggaaaggaaggtgtggcggagcctccggactcgcctcctccctccagagggcaagggggttctgctgatgcagtccaggcaggcccactccctggacaccaggagagtggaaaagggtggagactgagtctggagggcacggaggaaaattggctcagcatggattagaacagtctttcgcttcctggagcttaaaagccctccttacttacccttagctcctgccacctctctttgtccttggatggatacagcgcatgcctcctgcctgccacctcatctgtggtttctcatcctgtttgctgtcctccttcctcgttctgcccatgctgtcataatggatggaaaagctaaaggtgatttccagtcatctcttttgctgctgacagcatgaagtttgttctgctattagaatgacgcagacccgagacaagggttttgtcctgagttcattccattaatttctctctgcatagagcatctttccagcagctcctgcatgattaaattctggctgtgtgggacacaatggcacaggaagagcgttggccactcatcagccaggtcactaaaaggcaagttccacacatgaggagaaatcaaatgctcaccctttggacatccatccttttggtcctttgagtaacatttaaacaattgtttcttcagatacatggtccacactcaagagacctacaacagttggtatcacctggataagtattcaccaggctctctatgcccagttttttcccaagttccaaccaagagctattgatggctttgctcttgatcagaatagcattgggttttgctgcaaatatattcttgagcattatagtgatgaagaaagaaagaaagatagatagatagataatagagaaatagaagataggtagatagatagagaaagaagcttgcgtgtgtttgtttcaaagaatggggtcagttttcttacagccacctattctctcgcctggacatatattcagtgaatgcttctgtttgtaagatggctaactgggatatgggtcttacaggtcttcagttcctataagagtctacaaccacagcctcattaacacatgctctctggtgaaaagacattaaatggggagggaggaggtgtggatgctacgctggcttcaccacatgtaattattgaactttgtatatcactttacctttctgggtctcagggaccttgtctagaaacccaacaaggcaggctgtggtagctcatgcctgtaatcccagcactttgggaggctgaggtgggaggatttcttgagcccagaaggccgaggccacagtgagctgagattgggccactgcactccagcttctgcaacagagagagaccctgtcaaagagagaaagaggaaggaaggaaggaaggaaggaaggaaggaaggaaataaataagcaataagcatgaagtggcagttattctccaagtgaacagtgtggagtaactgccattttactggtactcaagtacttggtgtaactgctacatccaggcaactgctgagacttgagcaaggacctttacagcctttggaagtcccatccgtcagacacaccagggagcccgatgctgaacttcatgtctgtgtttgctgaatgatgagcaggtcctcttcagcgagagctacacgagctgtgaatttaccacgtgcccgtcaagggggtcattgtgttcctcactctgtcaataaaccacacagtaaagatctggataataggagcagaacagtttcaaaggacttgttacaatgtatcaagtcaataacttataattttagaaaatccctgaatacaaatttgcacaattttgagttgttttacaacttaccaggccgttaatctaagttttaaaagtctcttaatatacttaatcatagcctgtgcttttttttttaagtgctgaaatatgtttcagcattactgaaccacagcagcacaaggaaaaaacgactttaactcgttccataaaacttgcaaagcaaccataaatatatacagtgtggggtctgttttgtgcacaatttatatgcaataggctgggcttgatcgagaggatttatgcttatcgtctgtctccccaggcagacaattgtggtagaaaagaaaatgcacaggacctagagtcagggctgggtttcaatcccatttctgccacctgctttttgtgagaccctagggaagccttttgctcctttgaacctgtctcctacttaacaataatatgcccaccttagagggcagctgtcaggattgccacagagcaaggcagaggtgagccatctgcagatgcgtgctgaatttaaaccaatgcatgagtgacacggagcatgagagtggccagcatccttcctctctccctgcaccccgcaaaacaactccatcccccactctctctcagaggtggcagcggccataattcagacacatgcaacccagccagcgtaaccaccccctactcaccccctgaaaatagaagaagaaaggatttagagtctgggcagattgcttttaaaacatttccaaccttcgatctaatttgtcattattatttgtagagctttctttctcttccttcgtatctcctttcatatccggagcattcccagggaagatcccgttgctgaatactcgtgtctccagttttctacccggacttaaagatctactggtcctgcagagctgagctccagtggtgtgaaaggcacgtgagcgatgctgggcttgtggagatgagtaacacacaggcttgctttcaaggcactcacagccttacacatttgaaaatgagtttttcactggagcctgaaacttccagatttgaaaccatctccggggccaagcctggctgagactctctctctctgcatgagctgcctgccaccatcagttccccacccagatacccaagcctgaccttgacctgctgggggaaattcattatattctcgtttactccattttatagacgaatgtttcttatcatgaatgagagttcgttaaatcagctggttctaggtggagttcactagagccctctccaatgctgccggaggacctgttgccgtctgggctgtattgtaggtgggtggtatcataataagatccgtggtacacgaatgggcttcagggcaggcctgggttacatcaccacctcactttcggtgtgtcaaagctggaaaaaacagctggaaggtggccagtgttcgcttacccaacgaagcatgactttgcatctcctctaccctgcccagtgagggctccctgttttgaaggactggcatattctggaatgcttccaccaaatccaaacatcattctggatgaactgtggagcagttcaccgttcacagttcacaaaaggaccctctgtagaagcagaggatctttccctggggaaattatcctaagtcttctgattttaataactgatatagttcaagtatttgtccccgcccaaatctcatgttcactgttaatccccagtgctggaggtggggcctggcgggaggtgactgcatcatggatccctcgtgactcggtgccatcctcatgatagtgagttctcccaagatccggtcatttaaaagtgtgtgtttcctgccccgtctcatgctcccattctcatcacgtgatgtgcctgctcccacttcaccttccaacttgagtcagagctccctgaggcttccctagaggctgagcagatgccagtgtcatgcatacacagcctgcagaaccatgagccaattaaacctcttttctttataaatacccagacttgggtatttctttatagcaatgcaagaacggcctaatacaataattgttttccacatgaaataaacattgaccgtcttatccaactatacatgcttcttgactctagaaattgttgaatggaagtgctaaagattatcctcaaacacactcatgtgcacacagtttcagtgccagaacagtgtcctctaggaggaaagatggtcccagagcaattactggtttcctttaattttggcttcctaatgagtatcattttggtacgattccaatgaattgtttatttgaggaaagagaaaaagaaaagaacctataggaagagttggtttggattctatcgcgggcagtttatgcttctacgatagtaataaaagcaatgagagaaaaaagctacagaaccaaataaatatagatccaggagttgtacaacttttaaaagaaaaattctttagcctattgatccttcctaaggtaaacatttattttatttcagtttagaactcaagaatttttttcaagtacaactgaggaatagagtcagaagccacttcgattttgacaccatagaaacattctttctttagttactagaatcttttaaattgataagattggcattttcccaggatataacattcacctccactgtgtttttaatttgcaatagattttgagggaaagattccacaaggatttggccaacatgcctcctgagcagtgggtctcaagtgtggtccccagaccagcatgatccccatcagctggaaactgttagaaatgcaaattgtcaggccctaccccagacccactgaatcagaaactctgggaggggaaaccaacaatctgtgtttcaacatgaagtctgagaacttaaactatgcaccgttcttggtaagaaaataagagttttcctttgtgtgcgtatgtgaaaccaattccctgcaacccacagttgtttaaacaaaaacgtgtctagggagttcaaattaggtggccaattgccttataaaagtttacaaagtaaagagtctgtgctgtttccgttaggagacagaaacccaatcactaacttggagtatgagtcagaggcaggacagagaaatgtctgtctagtcggtgagctaattaatacgtgatcctgaggatggaggagccagggctgccgttccttctccactagggaaaaaaaaaaaagatgtttctctgtcaggcagctccctagctacctccagtatgttctattccatggctagaggagtgcagcctacatcctgtggatttatgtatattactgtaaaacaagctttctcttctcgagagttccgaagcagatctgtctctgattctttccatgaattcaaatacattgtcatccttaggtttcctaggtaaaggagactgcattactcatcagcatttaataaatattcatttgttggttgactgattcattatccttcatgccaatcacatggctgctactagcatgcatacagccgactcttaactacagttgtgtcatctacacaatccctgcagaaaactcattgaacacgtagtcgacacatttaaaaatgctgtgctgtggaagtgcaagttgcacaaacattttcatctttagcttcacttagaatacatttttttagttttttaatgtttttagagacagggtctgcctctgtgacccaggctggaatgcagtgctgtgtgatcatagctcactataacctcaaacttctaggttcaagtgctcctcctgcctcagcctcccaagtagctggcactataggcacacaccaccatgaccagtgtgtgtgtgtgtgtgtgtgtgtgtgtgtgtgtgtgtgtttgttttaatagagacggggtcttgctatgttgctgatttcaaactcctggcctaaagcaattatcctaccctggcctcccaaagtgctgggattgcaggcatgagccacctggcccatctataactaacttcataacactccaaattggaagaaagttggtggtgttattagcattattttacagatggagaaattaacacctggagttttgtgattacagagcagtggtaatcacccagttattttccttctctgtccctccagtggccctctgttgtctgggttaagtacagactttttagtttgaggaaaggagtccctccacaatttgtcattcctctattcttccagccaaatttcttacttctcctccaccctcaactacagtcaaacatcaaacaggccgggcgcggtggctcacgcctgtaatcccagcactttgggaggccgaggcgggtggatcatgaggtcaggagatcgagaccatcctggctaacaaggtgaaaccccgtctctactaaaaaaaatacaaaaaattagccgggcgcggtggcgggcgcctgtagtcccagctactcgggaggctgaggcaggagaatggcgtgaacccgggaagcggagcttgcagtgagccgagattgcgccactgcagtccgcagtccggcctgggtgacagagcgagactccgtctcaaaaaaaaaaaaaaaaacatcaaacaatactcactgagcccttcccacgtgccgggctatttgccgagaacttctcatgcattatctcatttaatcctcatcacaacttctctcaggtggaggcatgattgccatcccatcatacgggtgaggaaactgaggctcatagaagtaccttgccccaagccccatggctacttgcaggttccaagacaccggtcagcctgcccccctgcaccttggccatgctgcccactcacctagagcgcacagctgacactgagtcctcttctgaacctcatccatgaacatatttatgaaatctttcctggccccaagtggaaatgccccctcatttgggtcctcactgaaccccagtacacaactcttttgtactactctattatgctggggtgtttttttattgtctcacctgataaaccgtaagccccttgaagacagcaactcgtttttaagctctttataaccccagagcctcgcacagtacctggaccagattaaggggtacttaacagatgcttagtgaaggaaggaatggatttctcacctggttgcttatcttctagactcatttggggagtggccaggagtccgggagagctgccggccattgttccgtcccgtctgtatcccttgggctagtttcttctagactgaggtttctaagtccaaacaagatgaactgtgcacagtgcctcaattagggaacagcagcttgagtgctttggaaatacaaaagtgtagtttgtaggttcaccttgaaggcaagatcagacagctctacgtaagccagagctctgaaacaaagcttcaggctgggaccactttgcagtctcagtgcctggtagtggggactgttctacagagccgtgatcaaacctccaactgcattctggtcttggaggaaagctgattccgtatgaagagaaaaggcctggtgagagtatttgcagggctgaagaaaagttaacatctatagtttggcaagcagcagctgcaaagcatccgtcccagcacatgataaatgcttctgacgtttccttcagacacagtgtgctaggaaggcttttaagttctcaaatgcaggagtctgccttattgatcaggtgcctttcattaaaggtttccaagcccctcggctacagaggaaacgctcccctcagcctcctccacagccccagcctttcatgcagaggggattatcattgttggaatacggcatatactttaatttggtgaggctttttgtttaatgcttatgatatgcacactggaacagactgggattaggtaattttcacattgagttggtacttccctccctaacccccatctgatcttccatatacacattttaagaagaaaataaagagaagacacgtcctcctaatgatcctccgtattagaacttaccattctgctttgaactcctgctgctttgagtctcccactgccagcaagcacttctctgccaggcggaggggcggtgaagggaattaaaggggcagtcagtggcttgcctctggcgggaggtggcggagcgtctcattagcgtttgctcctttcctccagctgggcttcactgggcccctcttcttatcaacccgtccttcacttcacccaggctgtcccctgcactcagaccccctccagtccttccaacaagatggcagcaggatgactgggactcattggagctaagcagagaattaaagttgcttttgttccaaacctaaaacttgaaaatgaaggaactcttacgtggaaatgccaccatctcccttttgttttatgcgtaaacccaactggttccccatcctctgggtctccttcctgcccctcgctggctcagggcattgtacatactgtgtgttcaacacatgctgagtggaattgaacagatgcagtcctgggaaagggggccttttggaagaactgatggggaaagaattggggtaactgtgggcagttactggacgttcttgctcttacttattggttgaatgagaatgaaagtatctaagatgtaccaagtcccagggatagtggcataatttctctgttcctccttctgactccctcttctcccctcttttagtgtggggaagttacgagaacgtagcgtttggtgcagtgatccattcagtatacgtcgggctcttaagaaagttaaatttacctaacatcctacattttagataagaccgttccagatttccacctcttgacccaaaagatcccttcggtggttttccttactagggcaattcccttagtttcttggattcttccttcctctccttcctggaactaagctgcagagtcccaggctggagaaatagcccactgcccaggggtattttagaaagggcttcccaccttccgcagtgggcctggagaaggacgccttcttttcaccaccaggctgtgatctcgcaggctggcaaggcctttatgatgaactgaatgcggtctgtatttacgtgcctgccatctgtccccaggcggcactgagaagggggctgatgctgtcacccctagctccttctgcaggtctcctccgtacgtgccactgccaggaacaaaattatcatctcatgggagctgcacacatttaatggaacttgggagccagcacagaccgttttcctcaaagacagttttataaagaaaatggactttggggaacaacgccagaaagacatccagtatacctaattattaggcgagtgtggtcattgcctctttgtcttagataactaggttgttgattacggtgctttgccaaactccacggtggatctggtagctggtatttctgggcagacaccagactgagttacttcttttcagagttctggacgttactgatctaggtgaaaggccagaagcagtgggatattgaaattctcagaagtggagagactgtggcaaggaggtacagaagacactaaatcgggtgccatgttagcaagctcaagttttcatattgatcatgcagtgagctgcagagaagaaaagcagctttgcctgggtcctgttgttctccaagccaaatagcatctctgtgctgacagacgagtctgcgtctgcagacgcagcatctcttgactgtttgctatttaacgacagtcgtaacacatgagtgagctttactcatgtgggccctttattaacaataagccgcctctgtggcggctgggccccgcggggtcggggggtgggggtgcccaacgtggcagggaggcctgcaaggggaggccgaggcgccggtggaagcacaaaccacccggcgagtcagagcaggggtcggggcccctggccgcaccgtgccgcgcatgcgcagggtcccggggtccctggggtcccgggtttgtgcccccggggcggctgggccccgcgggaggggacggccaacgcggaaatgggccctttattcacaataagtgccaaaatccaaactgaacacatctaaaaaaattctaattaaggagcgtccactgctgctttctcaaaaattccttctgtgctattaaatattttctctttccaatggatatttaccatttctactcacagtagtttttctaccaagtattcagaaaaacctccagttgtcacttacccagtgtttaccaaaaatcaggcagaagagcgtggtggaagttggaagaccttagtgtaacccgcgtctataaaaactgggcgtccaggccgggcacggtggctcacgcctgtattcccagcacgttgggagtccaaggcaggaggatcacttgagtccaggagttcaagaccagcccggacaacatagaaaaaccctgtctgtacaagaaatttaaaaattagctgggtgtggttgtatgtgtgcgtcatcctagctacttgggaggctgaagtgggaggatcacttgagcctgggaggcagcggttgcagtgagcagagctcacaccagtgcactccagcctgggtgacagtgagatcctgtctcaaaaaaaagaaaaaaaaaaaaaaaaattggatgacgttgggcaagtgtggtgtctgtctcagctctgtgagtgtaggatgattcagaatctaatgattaggtctcctgaactcctaggtcaaacgtggttaaagggagatccagggaagcagtgaggaatgggctcttacaacactgtcatggacatgggttcaatatgttggcaattattatttattgaggacgtactttgttttaagtgcttaggataattatttgcttaatagtcacgtaagtccttcaagataggcattattatcgccattttactaatgaggaaactatgttaaaataatatattcctggtcacacagcgaccaagagtcaggatctgtctgccttcagagttcatagtctttccagtagcctcagtaaaaagtaataatagctaatatttactgagcacttactatgtcactgacattgtggaaagggatgttatgggcatttgctcttttaatgatcacagtaactctgctaggccagtactgttattatggccgatttatagatgtggacagaggaggttaaacactcgtgcatggacacatactgatcaacgtacagccagcactcaaacccaggccgcctgtctccagagcctgtgcccccaagctctaggccatgtgccctgtaagtcgcagatgggacgctctgacagcgagtgtcactgaggtcggagtgggtcatcaggcatgcctcagaatcccattccccacttcattcacacctgagaacgcctgtctctggatgcatctttacaccagctcatccatttaaaatcagttccctaatacaacaagctgaggatgaggccccttctaactaggccaccgtcagagtcccaatcctttctgacagaccagcccccgacatgtgtctgtctccatccttgcagcctggccagccctgtcccacgcctgctaattggtggggggacctggccccccaagcctgccggccattagcagtgcctcacggggaagggctttcttccttggtttcaactccctccctccagcgcgcagtcccttgccgggcttgcctggtgacagactcgtgttgatgaagacctttagggaatttccttccccctccgctccccgaagcgcttcttagagcacatctcattaccgggctccattctcccgtcctgcacatgctccctcacacttagctttattgtgccaccacttgtcacctttcccggcccggtttttaataatgcaaatcttccctctctgatggcatcgctgctcattatttgctgtctggcaccacgggagctcacccagcggcacctcggagaagccagccgcccagggtgcaggcgcaggccccactgcccgccccagtctcctgagagatggctccgctctggctatgacccaagatgctcatggagggaagagcagtccagggccagggcccttccaccttcgccaggcaggtgcctttgagcaagtcaatctctgcagcctcaaaataggaaagatggtaataattattataataatatccccttaacaaagcagttatggggcaaccaaatggaagtaagatacgagaaaagtctgtataaactgtaagatttgtaaaacttgtaaagaagttgtggtggtgttgctgatggatgattgattgatttggtcaacacggagcagtcgctgccccaaagtaggcctggagggcaccccagccccctcatctgccctcccacccccaaactcagcatggaatcatatggctttggactttctccaggtggataaagccccctgatctttgaacatgtcatgcaggattattattgtgtgttttgtttgggcaaagaaatttaagccaatttacttttgttctgtaactcataactgaactgtgctcagagtctctggggtcctttcaggcatgggtctgtggttctgtaatggtaactatgggttgatggagcaatggctttgtaaaatatgtttaaaagctccctctgaattgagggatcacagcctccttagttgtcccctggatttcctggcattggagttatgtaagacctccatgatcattgccatctggaatatgactctttggtaccccaaaaaacttctggagtctttcagtcatatggaatcaaaaagatcttcctttggaagaagcaattttagatcactgatggaaattttaccagaaaagtattcaaatcttttccttttataaaacctgggtttgttttttgttttttaattatactttcagttctgggatacatgtatagaatgtgcaggtttgttacataggtatacacatgccatggtggtttgctgcacccatcaacccgtcatctacattaggtatttctcctaatgctatccctcccctagctccccagcccccaacaggccccggtgtatgatgttcccctccctgtgtccatgtattctcattgttcaactcccacttatgagtgagaacatgcagtgtttggttttctattcctgtattagtttgctgagaatgatggtttcctgcttcatccatgtccctgcaaaggacatgaactcatccttttttatggctgcatagtattccatggtgtatatgtgccacattttctttattctgtctatcattgatgggcatttgggttggttccaagtctttgctattgtgaacagtgccacaataaacatacgtgtgcatgtgtctttatagtagaatgatttataatcctttgggtatatacccagtaatgggattgctgggtcaaatggtatttctggttctagatccttgaggaatcaccacactgtcttccacaatggttgaactaatttacactcccaccaaaagtgtaaaagcattgctatttctccacatcctctccagcatctgttgtttcctcactttttaatgatcgccattctaactggtgtgagatggtatctcattgtggtgttgctttgcatttccctaatgaccagtgatgatgagctttttttcatatgtttgttggccacataaatgttttcttttgagaagtgtctgttcatatccttctcccgctttttgatgggtttgtttttttcttgtaaatttgtttaagttctttgtagattctggatattagccctatgtcagatgaatagattgcaaaaattttcttccattctgtaggttgcctgttcactctgatgatagtttcttttgctgtgcagaagctcttagtttaattagatcccatttgtcaattttggcttttgttgccattgcttttggtgttttagacatgaagtctttgcccatgcctatgtcctgaatggtattgcctagatttttgtctagggtgttttatggttttaggtcttacatttaagtctttaatccaacttgagttactttttgtataaggtataaggaaggggtccggtttcagttttctgcatatggctagccagttttcccaacaccatttattaaatagggaatcctttccccattgcttgttttgtcaggtttgtcaaagaccagattattgtagatgtgtggtgttatttctgaggcctctgttctgttacatttgtctatatctctgttttggtaccagtaccatgctgttttggttagtgtagccttgtagtataatttgaggtcaggtagcgtgatgcctccagctttgttctttttgcttaggattgtcttggctatatgggctcttttttggttccaaatgaaatttaaagtagttttttctaattctatgaagaaagtcaatggtagcttggtgggaatagcattgaatctataaattattttgggcagtgtggccatattcacgatattgtttcttcctttccataagcatagaatgtttttccatttgtttgtgtcctctcttattttcttgagcagtggtttgtatttccccttgaagaggtccttcacatcccttgtaagttgtattcctaggtattttattctctttgtagcaattgtgaatgggagttcactcatgatttggctctctgtctattactggtgtataggaaggcttgtgatttttgcacaatgattttgtatcctgtgactttcctgaatttgcttatcagcttaaggagattttgggctgagacgacggggttttctaaatatagaatcatgttatctgcaaacaggcaatttgacttactctcttcctatttggataccctttatttctttctcttgcctgatcgccctggccagaacttccaataccatattgaataggagtggtgagagagggcattcttgtattgtgctggttttcaaagggaatgcttccagcttttgcctattcagtatgatattggctgtgggtttgtcataaatagctcttattattttgagaaacgtttcatcgatacctaatttactgagagtttttagcatgaaggggtgttgaattttgttgaaggccttttctgcatctattgagataatcgtggtttttgtcattcgttctgtttatgtgatggcttacatttattgatttgcgtatgttgaaccagccttgcatcccaaagatgaagccgacctgatcgtggtggataagctttttgatgtgctgctggattcagtttgccagtattttattgaggattttcacatcgatgttcatcagggatattggcctgaaattttctttttttgttgtgtctctgccaggttttggtatcaggatgattctggcctcataaaatgggttagggaggagtccctctttttctatagtttggaatagtttcagaaggaatggtatcagctcttctttgtacctctggtagaattcagctgtgaatctgtctggtcctgggctttttttggttggtaggctgcgaaattactgcctcaatttcagaactagatattgatctattcagggattcgacttcttcttggtttaggcttgggagggtgtatgtgtccaggaatttatccatttcttctagattttgtagtttatttgcatagaggtgttcatagtattctctgacggtagtttgtatttctgtgggatcagtggtgatatcccctttatcattttttattgtgtctatttgattcttctctcttttcttctttgttagtctggctagcggtctattttgataatcttttcaaaaaaccagctcctggattcattgattttttgaaggattttttgtgtctctatttccttcagttctgctctgatcttagttatttcttgccttctgctagcttttgaatctgtttgctcttgcttctctagttcttttaattgtgatgttagggtgtcgattttagatctttcctgctttctcctgtggacattgagtgctataaatttccctctaaacattgctttaaatgtgtcccagagattctggtatgttgtgtctttgtgctcattggtttcaaagaaattatttatttctgccttcatttcattatttacccaatagtcattcagaagcaggttgttcagtttccatgtagttgtgcagttttgagtgagtttcttaaccctgagttctaatttgattgcagtgtggtctgagagactgtttgttatgattttcatttttttgcatttacttccaattatgtggtcgatttcagaatatgtggtgctgagaagaatgtatattctgttgatttgggttggagagttctgtagatgtcttttaggttcactcagtcctgagctgagttcaagccctgaatatccttattaattttctgtctcgttgctctaatattgacagtgggatgttaaagtctcccactattattgtgtgggagtctaaatctctttgtaggtctctgagaatttgctttgcgaatctgggtgctcctgtattgggtgcatatatatttaggatcattagctctgcttgttgcattgacccctttaccattatgtaacgccttaattgtctttttttaatctttgttggtttaaagtctgttttatcagacactacgaccgcaacccttgctttttttgtttgttttccatttgcttggtaaatcttcctccatccctttattttgaggctatgtgtgactcagatgggtctcctgaatacagcaccctgatgggtcttgactctttatccaatttgccagtctatatcttttaattggggcatttagcccatttacatttaaggttaatattgttatgtgtgaatttgatcctgtcattatgatgctagctggttatttttcccattagtcgatgcagttttttcatagcatgaatggtctttacaatttggtatctttgtgcagtgggctggtaccagttgatcctttccatgtttagtgcttccttcaggagctcttgtaaggcaggcctggtggtgacaaaatctctcagcatttgcctgtctgtaagggattttatttctcctttgcttatgaagcttagtttggctggatatgaaattctgggttgaaaattctttaagagtgttgactattggcccccaccctcttctggcttgtagggtttctgcagagagatctgctgttagtctagggaagatgggcttccctttgtgggtaacctgacctttctctctagtgcccataacatttttccatcatttcaaccttggtgaatctgacgattttgtgtcttggggttgctcttctcgaggagtatctttttggtgttctctatatattctgaatttaaatgttggcctgtcctgctagtttgaggaaattctcctggataatatcctgaagagtggtttccaacttggttccattctccctatcactttcaggtacaccaatcaaacataggtttggtcttttcacatagttccatatttcttggaggctttgttcattccttttcattcttttttctctaatcttgtcttcacgctttatttcactaagttgatcttcaatctctgctatcctttcttccgcttgatcgattcagctattgatactgtgtgtgcttcatgaagttctcatgctgtgtttttcaactccatcaggtcatttgtgttcttctctaaactggctattctagttagcaattcctctaaccttttttcaaggttcttagcttccttgtattgggttagagcatgctcctttagttcagatagagagatgataagggatcagaagaggccagtggtgaattaactctgtagcctagaaccttgtaggggtaaaaactatttatcatcacctacacactcttactgggcatttattgtggccaagactcgggttcctgtgtgtctgtagagggccttcattgtgggtatccacaaagtgagttgaaacaaagctcatgcatgagaagcgctgatggagttctcccttgctcctgccaccttcttatcatctgtagtctttttcttactgctgagggatccttccagtggtcacatttgcccatagccctcctgaacgcttgagtctgcagaaaacctctagctggacagcttctgggtagagaaacaggccatgaagagcctcctacatgtgcaccatgtggctacgctccgtgacgagggaaaaacaggaatatctgtctgctgtgatcacgtgtagtggtcacggtgagagatgacggggctgctcctcctcagcctccagtcaggctgtgtggcagcgatcacctccatgtcgatggagtgtctgtgcagtttgggagcgaggctctgcctctctcggtgagtgtctcacagttcctttctccctcagccccatgatgccgtccagaacaaggtgctgaactgattaatgagcaggacataaagacaactgctgtccagagcaacagctgtcccaatccatccgtggaataaacaaacagggcagagcgaggtcccgaccagtggggacttgggtgcaggaaatgccagtctcttcttgcttgaatcagggtgtcagggggccttcctggccaccactcaggctgttcctttagctttctggatcccattccctgcaggtctacccttgggagtgaaatagtgaccgtccctttgagcccgagagctggggagaaggccgtgcctgttaacagctgcctggaccctctctggagagcagcagggagaggcggggctggaggagatgttgccaagaacctaagggtgttagtgacaaaagcaagaactcctggcaacaagtccgagggactttcttgatcacaagtggtatctcctaagcactttaattatagcagattaagcaggaagtggagtgccggactaaaggaataatgatacaaaggaggtgaagcagaaaaacttaatttccttcctttaagggaaaaaaaagtccatttatttagacgcattgcaaagaaaagaatggagtgtggcctttcccccagctcggagctcagtgggtttttaaagaactgtgtgtatctctttggccagaccagcgactgggatcttcagcctctctgcagaaaatgagccgcaggctcgggatttcgttaagatgcaggagcattccttctggaccaatgactcactcattcagccccttctttcccgcttctccttgtcagccctcgcctggctgagctcatattttacattcagcacctctggttacccagaaattgcatgcaaaattgtgaaatagaaaagcagtgggctgtgggctccatcagctctgcctggcgttgcatcatccttgacttgcaatgctcagaggctgggctaggagatttgcttacagaaagcctgaaggtcccagggaccttcccaaagttgcgacttgaatgcatgctcttagcacacatgctgtgtaactggggcagatctgtaggaatgagtggaactgaaatcagaccttagaaagtcacagtgaataagaaaattgccagaatggaatgcagatatacctactggttactgtcctgtatgtagcggctgtgtgggatttgactgtgttttactaataggagccttgttgggcccagtgcttcataactagctctgtctgtcgggaatcccccacagtatcctgcttgtgattcacgctatccagagtccagggcaaggagttctaaaaccttatcatgttttgttttgttttgatacagagtttcactcttgttgcccaggctggagtgtaatggcgtgatcttggctcaccacaacctccgcttcccgggttcacgccattcttctgcctcagcctcccgagtagctgggactacaggcgcccgccaccatgcccggctaattttttgtatttttagtagagacggggtttcaccgtgttagccaggatggtctctatctcctgaccttgtgatccgcccgcctcggcctcccaaagtgctgggattacaggcgtgagccaccacgcctggccgttttgtttttgagagacaaggtctcgctctgtcacccaggctggagtgcagtggcatgatcatagctcactgtaaccttgaactcctgagctcaagtgaccctgctacctcaacctcccaagtagctggcacctgtaggtgtgcaccatcacacctggctatttttttttaattaactttttgtagagatgggctctcaccatgttgcccaggcttgtcttgaactcccacctctgcccacatgctgggcattcaattcctagatctcttcctccctcctctcttgacttgcctcctcctggatcatgatatcttatcattttccaatcacagcgttaatggtaaggcttgaggctgggcgtggcacccatgcctgtaaacccagtgctttgggaggcagaggtgggagttcaagacaagcctgggccatgttcagcactttacatgcccattcactgagtttgcacagccgcccatatgacgggcattgttattcctactgtacaggtgaggaaatgggggctctgagaagtgtgactgtttgtgggaggcagcagctggcatgatggaaaaagtgtaggcattggaggtgggatccaagtccagtcttccacccacaggttcagtgatgtggggcaagttatataacacagttttctcatctgtaaaatctggacaggcatacctacaccctggagcattgggaggattaaatgagatcgtgtagataacagcatagtcctggcatatgagagaaaatggcagggatctttctatgacctcagtgtgagaagcaagatctaaaccctcagaggtagagtgcgtcccacactcgggctccttctactgggacactggcttccggatctccacggagaactgttcttaagttagaaggcaagcacagcggggacacggtgcaggacacctgcggacccagtgcccttgggattctttaccttcagctttgctcactgcagattagtcctcatcgctcagcagagagagtcgagattggcaggaggatctccgtcttgaacaacattatgattctctgagcatttctatatgttgaaaatattttatttaaaaattacaaccacccctcctcctcaaaattgcatgacagagatttcaccaaacctgacaactgatgagacaaagagaacaagacacagagaggaatttagaaataatccttgtgcataccttccgaagttgccacatattactaaaattacctgtatctgtgtctatcctgctactctatgcattacatatctttgcatcccccatgcctagcacagtgcccagcacatagtaggtgctcaaaaaaagtgcccatcatttgttggactgaactcacaacacagtaacaaagagccagttagagcaaatgctgtcccttttcccaggactgtagcttccagacccgtgtgaggcctcagcctgatttctgttcaccttagaaccccaaggctgactgtgcatttccataagcacctcgctcgcctgcaggacggggctgggttggtggtgggtaccagaggtgctcagtgttcaatcacgcagaaagtgggctaaagggcagcgcctcctgctccctccagagatgcacttccattctctgaaacgacaacttctctgcactcgcttaatgggatcccaaataacacgtcgcagaccagtcttttatcactgttgccccttggaacacatttcgaatgctggccattaaaagcaggccatttcacggttctttaatgatgacactaataactgtggatttttgtctcccagagtcctgatgagctgagccaaggagtaaattacggagctaacttttatgtgcatggtttattgatctgtgagcttcaaggaaactgcaccagcccctatagtttggcagtccagactaccttttcatctgtgtaattgggccacgagggcgcagttaatattcaatttatattaataggaagacaaagaacatgatgtgccagctccatattgaagtaatgggcatatcaaaatattctacctggtaattataaataaatcagttttcccgtgacccaccaaggatgatgttgctaattcactgtgcatttcatcataatttatcctgagaaagttcagtgctgccatgtgcatgtatatcgcagagtatacaagggtgctccatcgtaaaacacccagctgtcttcatccatgctgtcgcccatcttttcttaacaggtgaaagtcatgcttcgcatctgttccaccttggctcgagatacttcagaatccagctctttcttaaaggtggacccacggaagaagcagatcaccttgtacgatcccctgacttgtggaggtcaaaatgccttccaaaagagaggcaaccaggttcctccaaagatgtttgccttcgatgcagtttttccacaagacgcttctcaggtgggtatcagccccctctcaggctcaggcaacgttgatgaaagggcaacgtttactcattcacaagggcccttgagctgggagggtgtcttctggagcattctgatggaccagttccttcaggagtcaatctgagctccaccgaatggtccagtgcttttgaattactggtgtcagaccttgggcaggatcagtgtgcacagatttcaataaaatctgtccttggggagaaggaagtgtgagccagtcagtggatcacacacagaagcaggaagataacagaaagggacaaggacaatgcgtcaaggtgctggtgacagatctagtaggaccctactcctgcctgggcattgtacgaagggaaaaaaaaaagtgtttcagggagctgattagaattaggccatctcctaggccctgtataagcacactggggttgagggcaagcctgtagccctagtaaggaaccagagtgcaaggcagggaaaccgaggctgacatgcatcctgtggcctggctcagtggagtgaaggggaagaagagaggctcagggacaggtgttgtattcgctgaattgctgccttacaaatcaccctaaaattcagtgcttaatacagtaagcatttatcattgctcatcggtcagctgagcagctcttctggtcctagctcagctcatttttatgtctgtgatcagctgtgggttgggcaggcagctctgtggatcttggctggatatcagccaggcgaaataagatcatcctatatcacaccataggcacatgtctttgggggttggctggccttacactggtgtagaatagccttgaccaggtcagctggtctctcttccacattgtcggtcgtcatccagcaggctagcttgggctagttctcaaggcagtttccaggacccatgcatgcaggtctctggaggcctaagctcagaattgacccaatatcacttctgctggattctactggcccagcttcatgagatggagaagagattgcttctaatgattggacgagctccaagtcacattgcaagggagttgcacccaggctggggtggagaattggggccatttttattaatctactatgagcataattgggaggctacttgggggcccagggtaccaagattactgagccatgggcagccaatgaactgcagacctcaccagatgctgcaactaaagctgctagtagatatctgttctcctttggattcaccctggagctttggtgaagatgggcctctaagtggcacgaaacagcacctgttccttcaggggagggagcagggacagacgtgtagaactgattgcagaaatgaataacccaggttatagaatatagcctactttgcctggagtttgcatctttctggtaagtttctagtgcttatcaagatttacattaaacagtgtataggataataactaataatctatagcagaacctgacgacaacagtgcgaatagttaccatttgcagcctctgtgaatttcctccaggctgcatctgagtagaggaggtggcgatgttctcacgggctcctatattacaccgtgggcacacagcacatgttacaggctccattcattaagaagttgagcatgcggtttccccaaagagttttacccaagaagacaaagtactttatgaataagttctatggtttctctccttattacattttttgtgtggcatatcacccaatgggctcagtaatttaaacctgacgtttggtctaacaaatggcctacaaataatttcattaacacagttaaaacttttcagaagcaaatctccacaagttgtaagaattccaaagcaaaccctaaatcaagcatggactatgaatgcgttttagatttattccagaaaaagggtccattttaattgctagtctttgtttacatttcacactcggctgcagagctcagtatgctcaatactggagtttcgctcatttcagaatgccttactttcattcacatttccaatgttataataaattacatgtctgtataaatttgcagttttcaagacatttcgtagacattaacacatttgactcttcctagaattcagtggggtaggaagagaggcactgatgttctcatgtgacacacaaggaaaccgagactcaaagatgaagtcacttgttcaaagtccctttcccgagcagacgtccttcctggattccccccgttaacctctctgtatcctgctcggtatggtggtgtatctttgacctcctgccattttatccaatatttcctagcagtgtggcctcaggcgagtcactcaacctctctggacctcagtgtccttcctcatctgtcaggtgaggacatgaccacaatgttcctcatcaggccgtgtgattcctcgagttgacacacaggaagtgctcacagcagagccaggaacacagcaagtgctcaacaaatgcggctatttttaccgttatcactgccaatattagcagcatgctgctggccagggcaaactcagccccacagggtgggcacccctggagcccccaagcctgaaaggagggagtgtgcggagtgggcctgtgctctccagtcctcattttcagcctgtgaagccgcagccactgtggtgacccgggcagttagaaattgtgctttctcttcgtttctaaggaaatcagcttcctgaagctaaacagtgattagaacagtcctgtttcatggttgcctttgagagccatatgacccttcagtggcttcggcagtcgctggctgcccctgttgggacacgtctctgctgggacacacccctgctggagaacctggacttgtgggcaggcagagccttcctgcagacctggcccttcccatgggggctgtgctcgagaaggctgcatgcctctccaggtcccaggggaagcagcaaggggcctccggggcccctgccagctcttaacacacaccagatggacagcccgctgaccacgctcttctcagtggagagccgggtgggaactgtgccaggggatgccgccccaactctgcacagcaggtctcctctcgcccccggcctctgcacgggtgactcagtgtggtccacacacagccaacattctcccaggtggctcaagaatcaaatacagcttattttatgtatagctcaaggtgatttctcagcctcctgcctcccatcccactttatgtccaaagaaggcttagtccattgggcagccttctgcctgctctgcagacacgcctctggcaaattccatcaagacgctactgcttctgtctcagggttagcactgggctctccttgcctaagtcctggggggtttgaaagatcctgtgtgccctacagcagccctgtcctgccaccccctctggcccaggaggagccccccgccccccgcagagttgctggggaccaccctggaacaagtgacagctgttggaagtgtggtttttcaattttagtttaggagagaaaactgatttccaaatacttgggttcactgtgctgctgaataacaacattcacggcccaggtgcccaccgggaggcacgctgccccgagggctgcaaagccccatgttagcactgcctcccggagctcccacgagccctgactccggccccgagacagaaatgaaagcaacagggcacagcgaataatgctatctttctgcttctgtgacaagtctcaggtgctaaacaaagagaaggacatttcccagatctccaagttagtccacaaaaccgacagctctgatggctcgcagagctctgtattagcgggtgttcaggggaaatacaaaacatcatcgagagcctggtccctgtctaggatttaataatcaaattggagaccagacacacacacccggccaaagaacacctaataacataccatgtggtgactgatactctatatgttgaatgtatctgtagcaaaaggaagaaaaggcaggttttgaaaagaggagcatgggacgggcgcagtggctcacgcctgtaatcccagcactttgggaggccgaggcgggtggatcacctgaggtcaggagtttgagaccagcctgaccaacgtggtgaaaccccctctctactaaaaaaatgcaaaaaattagccaggcatggtggcacatgcctgtaatcccagctactcgggaggctgaggcaagagaatcacttgagcccaggaggcggaggttgcagtgagttgagatcgcaccattgcactccagcctgggcaacgagactgaaactccgtctcaaaaaaaaaaaaaaaaaaaaaaatgaggaaggtgtgaattgaaaatgaggaaagagatcaggagagaaagcagatatatatcacaaacctcttgcttacgtgagaactacggtgtttctcaaggtctcacttgtgaaatggtgggtcacctttttccctctcataagcctggcctgtttaataaactctatgtatacgtgtgtcagcagagggtgagtggagagtttaaagaccttatccgggaccccagaatggcagatgagggaagggaatgaggttcatgagcacactgtgcccccattccagcctgctcctgcctgctctacagacgcattcgctgaaacgtaccacggattagcagaagggtggtttgcagtgcatgtgcataatgctcaggcttgcaaagggcggaaggtcgccaggggttctgagcatctccaaaacttcacgacagaggccaacccacctgggaacacagtgacactgggacccgaagccccaggaaggtgggctcactttcgttgttagtggtgtctccgctgcgaggtccattcacggctcgtgtctcctcttgtgtctgacaggctgaagtgtgtgcaggcaccgtggcagaggtgatccagtctgtggtcaacggggcagatggctgcgtgttctgtttcggccacgccaaactgggttcgtgagagtttcactttctcatgcggctcgttgagctccctgtcatcccatgcattcctctgtctccctcccagagttctctgatgacaggaagggctgcgtttctcttaggtgttgagctgaataaccaataacaagttatacgacgaaaacctatgttgttcattgtaggtggacacccattcatgtaggaaagccttcaagtccaaatagatggaaagagaagtagcagagttgttcccacttggtccaggtcagagtcaagcccagaaggcaggcaggaaaatattcatttcctgagcagccgctgtttgggaagcagatagggccccttgcaccaccgcacccatgaggatgtgggttggtggttggacccctgtaaaagccagaggagcaacctccaagcaaagcccagagcccagggcgcgtctggagaaagcagtgcacaccgtcgggaacactccagcgctgaagcgtctgggaaaggaggcagcagagccccccaacaaggggttcataaatccccccacagtcccatcttacttctgacctgtggccatctgctccccaggccttgcccttacacgcttgatatgtttagtgaattgaggagcttcaaaaactgtcccttggcagagattccaacagaggccttgctggagctcacagaggccagttctcagccaggacagaaagccattgcctctctctgcacttccgtcctccccagccctttctcttgatcttgatgtaagcagtgatctgggttttaatagaatttgctcatgccataaaaatatacacagcatttaacttgagacaggatataaagtgtgaatatgtggacttaatctggggggtaactataaaaagaaccataatgatgatgaaaaagcccagccttcccactgtgtgtaaagcagtgcaggaactggatagcatgtgatatttggggtcctcctcaaggtacatggtgatttaatcttgtcacatgtctgggctcttgctttgtttcttttttttttaagagatggctctcagttgcctgggctggagtacagtggcatgctcatagattactgtaacctccaattcctgggctcaagtgatcctctcgcctcagcttcccaagtagctggggccacaggcatgccccaccacacccagataatttttaaaaatttttcatagaggcagggtctccgtatgttgcccagactggcctggaactcctggcctcaagcaatcctcccatcttggcccccacaaagtgctgaggttacaggcatgagccactgagcccaaccagcattctttattgtagccatttagttagtaataccagaaaatgccttctgttgttgtcaaatactatttctctcatctttttgttccttctcttcccttttccccccttccctgtgcctttcttctatatccttggcatctattttggagactccgtggaatgatgcctggacactgaacctgcttttcttccttccctggttctcccaggaaaatcctacaccatgatcggaaaggatgattccatgcagaacctgggcatcattccctgtgccatctcttggctcttcaagctcataaacgaacgcaaggaaaagaccggcgcccgtttctcagtccgggtttccgccgtggaagtgtgggggaaggaggagaacctgcgggacctgctgtcggaggtggccacgggcagcctgcaggacggccagtccccgggcgtgtacctctgtgaggaccccatctgcggcacgcaggtgattgcttctgaagcctggctcgccccaaggtggctccctccccacctcagaggctggggcagctccacccgtgaatcactgaacctgtaaactcagaggcttacgggtgtttactttaaagtggactggaactttatggcctgcagctgtggggccatcggcttgcccagtctaaatatttgtaccttgactctaattgacaatgagcagggaccacaattacagcatttgggggagaaatggaattcactttctttatgcccctttcaaaaaaaaaaagtaacaatctttcttttgtttaacaacaaaccggaatatttactgctctgcacaaatagctagagccattacggggctgttgatgactctataaactgtgcttctggcactggtttacagccggattagcagtgctgcaggaaaaactaataaccactttctaattagaaccgtgatataattgctagaactatggaagccaagagaagctccagttcaccatttcaggatgctaagcctgttgggagggtctctcctttgctgtttgacaacagatgtaggaatgacccgggagctgcaattcattcatatccagaataatcaatccttccagtctctaacagtaggctttattttcccgtgttgtcagatgcctccttttgtagataggtgttccgtttgataagtacctgcctcttcccaactgggattgtttgcacaggtgaggatacctcccgtggcctgttatactcattactcaaacctgaccatgctcttcccctgcttaaagcacctcagatccctccatttccctgagtcctctttcgtctgcatctgtcacctcgaggacttgtttaaacactgatcgctgggcacccccccagagtttccaattcagtaggtctagagtagagctccaaaatgtgcatttccaacaagttcccatgagatgctcatgctgccggtccagggatcacagttggaaatcactgttctgaggcatcaaatgtgcagagacagtatctacacagtgtctgtgatgcaatcagtaggactcgacccactgctcctgttccaggcattttctagacattcaaatatgctttcacccccattcatttttagaacttcattgatgaaattccactaaggggtgaaaagtctggttaaatgaaggctaagaaaaagaagaaaagaccaatattccctttaattcttgttgaaaaatcttttaaattctttggtttatttttccatagcgagacaaaattttgaacacaaaagaatctctctttgaagtctgaggattttgatggcctcaggttctaaatattggctcttacagttcaaaattatttgtatagttagagtagaaaattgtcagaatttgtaccaaccttaagacatgtactgcaaattagttctttgaacaaatcagaaacatgagttgccttttctccccaaaaagaggagtgctggttcaattctgttaatgtgatcgttgtgattcaggtttaaaataattgccaagtattttcataagattcagacgcattaccctgtgtgctttctttaatcaattaatgagtatgccgggagcatggattcaggaactaaaggtaaataggtatctcctaaatttagatgagacattcaagtatcgtgagtgtttgagggtgccctttacactggtttcttatttataactatgctagtaaatatggcctaaaattggctttaattaaataactgcaaaactaggagtcaaatgaaagctaaccaagtttttttacatctttgggacaccactgctatgaggcctcaaatcacattttgcaacctacctgtctccaaacaatctaatctttggactcaagatgcagtcacatcgctcctgttttcttaggtaaatggatagccaggggtgttggtttgccgccctctgcagagataaggatgagccatctgctcccagcttttcacacccactagttccagattctacttagactgtaaagtaggtaaaaataggtttcatccaataagtatgctcaatattaattttcagaaatgaattaattaagctgagaattgcacatgagcatagcaccttgtttcagaagggttttcagccttagaggggcacgtggctttactatacagaacacacagccagctgaatggtgctggggacacccaggcatgagtgacagcaagccctcctcagcctgcagcctcatctcttggcttctgtcttccagctgcagaaccagagcgagctgcgggcccccaccgcagagaaggctgcctttttcctggatgccgccattgcctcccgcaggagccaccaacaggactgtgatgaggacgaccaccgcaactcacacgtgttcttcacactgcacatctaccagtaccggatggagaagagcgggaaagggggaagtaagtcggccactccaccctcctgcctccttagcggctctggccccagccagaaatcccttgggcaaccatgacctttgtgtgtgtgtgtgtgtgtgtgtgtgtgtgtgtgtgtgtgtgtgtgtgtgtgagagagagagagagagagagagagacagggtcttgctctgtcacccaggctgcagtgcagtggcacgatcacagctcactgcagcctcaaactcctgggctcaagtgatcctcctgcctcagtctcccaagtagcttgggactacaggctcatgccaccacacctagctatttatttggttatctttgtagagatgggaccttgctatgttgcccaggctggtctagaactcccggtcttgagatcctcttgccttgatctcccaaagtgttgggatgaaaggtatgagccaccatgcctagccaaacttttcttaatagactacaatatgcagttcagtgactcgtaattcaagataattatagtatctgggctgaagttcacttttgaactgtccagggaaaggagtttgctttggtaaaggtaatttacaaatgtcattgccatgagaatgtgagaggtcaaagttacaaaaagaaaacaactgcctgacagtatctttttgttcacagacctcaaaaatgctcctcaagaaagaccaacatttatccaccaaagcactccggcagtgtgttatcatcattagctcgaggccactgtatggaccatgttttttaaaatagcatagaaatcagacttttgaataactacccagaccctggctgcctccctcaaatcgtcagtgaaggtttactgtcaaaacccaggtacggtgcctgctcttcgagtgagctgccctgccaggaacccaacactgtgcccctacagacccctcttggctgtgtttccaaagtcagcccgggctggggtgcaattctctgccttctgtgaagtagtgtttactctatgcccaaaagagttgagcaccagatcagctgaatgtctccagtggggatcttggaccaggggcaaagtggtctgttgatttcactgggttcctaaggcaggttgtgggtaacggggctgctgggctggccgggcagtggcttccgtggttcctccatgtcccgctctgccgggctttcaatacacaggcaactggctcccagcgctttctgcatgattgtctcaaagacactggatgccagaaaaacaatcagaaaactgagttaagagtctaaccctggactggaaattgtaaagctcattgagtaaagcagagatggtccgcaaagctgttgtagatgaagcctagaatgaagacatccaagtaggaccaggcgtggtggctcacacctgtaatcccagcactttggaaggccaaggtggttagatcacttgaggtcagcagtttgagaccagcctggccaacatggagaaaccccgtctctactaaaaataaaaaaattagctgggcgtggtggcacacacctcccagctagttgggggtctgaggcaggagaattgcttgaacccaggaggcggaggttgcagtgagcccagatcgtgccactgcactccagcctgggtgacagagcaaggctctgtctcagaaaataaaaataaaaagacttccagctgggatctatggacaggctccccctgatttcccctaagcctcctcgtggctcaaaagacctggacaacagtactcctggggagagagctctttgcgggcttctgctgtccccaggcaaaagcgcctcccttcccccacctcggtgcctctcttcctactctttagttactgttgttaaaatccaggtttattgcagtataaggtacattcaccaaaacatcactttgatgtgtctttagatgagttttggccaatctatacagtcatgtagccaccaccattatcaaaatagagcataaggctaaagttccctcttgccgtttgtcccttcccctgacctctagcccctggcaaccacggatctgattgttgtcctggttttgcgtttatccaggatatcgtgggaatggactcgtgtggcccagatgtggccttttgtgtctggcttctttcacgtagtgtcctaatgcatttgagactcccccatgctgcagcacgcgtctcttgtttcttctggttcctgctgcctgttctgcctgctcctttagtttttttgtttgtttgagatgaagtctcactcactctgttgcccaggctggagtacagtggcgtgatctcggctcactgcaacctccgcctcccgagttcaagcgattctcctgcctcagcctcctgagtagctgggaatacaggtgcccaccaccatgtctggctaatttttgtacgttaagtagagacggagtttcaccatattggccaggatggtcttgaactcctgacctcgtgatccacccgcctcagcctcccaaagtgttgggattacaggcgtgagccaccgcacctggcctctccttcagttttgactgggcctggaggcttggttcctaccctaccaccaggacagaatgaaaatatccacagctggggctggagttcctctaactggggctgctttttatggctctgaaaatcagccctgagctgcctccagtggctgctgtgaagaaccgagaggttctggtcctcacttacagcgggcgaggcgccccagggaagtggcccattagcttgagggcagctctctcgacagcccatgatggtgagcaaagtctcactggagaggagccgaggatagtgaacgggaatctctcgggagatgtattcttggtaacaggctcacaccatgtagagcgcttccgtttagaatcacgttcttaaagaaggaaacgcattcggatagggatgaggagatgcagacctttaaaatcggatagggatgaggagatgcagacctttaaaatcggatagggatgaggagatgcagacctttaaaatcggatagggatgaggagatgcagacctttaaaatcggatagggatgaggagatgcagacctttaaaatcgacagcacaattgcatccacatttctcctgactgtgtgggagttggccttgaaccctgccctcactgttttctcctgggtagtgtcttcaccctgtcaatgtaagagtctgacaaatgtttagtttattcttttaagcagctgtcagtaatcatcatcatcagagcctgcaggactttcttgtactttcagtaaagagtgactcgcaaaacatctaacccttgagccaaatgactcccaaatggcactgatcagaaaaacttgggagatgggattatctctcctccttccaggtttcaaaccaaactgaggacaactctgttttcggttttgtactttttttcttttttgcagttctgctttcgatttggaatctgaaagtagggagaaatcttgaaaacaaggaaacagttcattaaatgacttcaaatataagaacttgaaattcagattccacaaaagtttaggccaagacattccctaaacccagtgatccaccccaaatcagtacctaaggaatcctgcacccttattaaatatttaatagccagctcatcttcttcctatttttaagttgtgaaagagaattgcttttaaataatgcattcaggttaaaagaaagggcaaataccacgaatggtttccaaaacctcggttaggtccttcctaatgtttcagtggatgagaacaaagaaggggaaggagtccaggggtcgtgcgatcggcagacctgggggacatctcttccctcccgaggggaaaggatcccggccagaatgcacacggcctccccgcctgggactcacttgacttcagtgaatttataactgtttaaaatataatgaggagatttggagggttgtttaaaatggaaattttgtttacttacatataagtaataatccctgcggacctggcagccagaactcaattaggggaaagtttattaattagtcaccctgcagggaagccattagaagagatctctgccgcaagaactaaatagactctgtgtgcgcctctgaatctcatatgcacacatgcattttatacattttacacacaaatgcatcttacatttataattttacacacaaatgcattttacacatataagtagacagacaaaaaaaagttttaaacatttccagtcaaaatagaaaagtctttgttgatgtatccctgttttgcagatagcactaggttaagcttaaaatatctccctgtttaaaagctcattggaattagtgggactgatccttcagcctcatggaggccttcctctgctttgcgaagctaaatctgtaatagcttgagagcctcctcgggaatcccagcactgggaaacagaccctgaagccctactgatcagagagctgcttctcataacgacgcgtgtactgggcacctaaaacaaggtggtgcttgggaccagaagtgtttcagatttcagattgttttccgattttggaatatttgcatatgtaatgatcccttgggaatgggacccaaatctaaatacagatttcatgtatgtttcatatatgccttatagacatagcctgaaggtaactttatacaatatcttcaataattttgtgcatgaaacaaagtttttactgcattttgactgcaacccctcacgaggtcaggtgtggaattttccccttgtggcatcatattggccttcaaaaagtttgagattcttggagtattttggatttcagattttttgggttagggatgctcagcgtggactagtgatacttcagggtaatgcgctaatgatacggagatcgcacctgtcctgttgacaaagataatttcaaaagccccacttttatgagtaatctaagcatgcaagcaactgttgctcaaggtccacaatgacaccgggtctctgatttgttcattctctttattgcctctgtggggaggattagagggctttgtaggctgggctgctgtgtgcgcacacaaatgtatgtgcacatgggcacacatctgtgctacactcatctgtctacacatctcatcagactctttaatctgtttttttgtttgtttgtttgtttgtttgtttttaacactgagtctcgcactgtcacccaggctggagtgcagtggcgcaatctcaactcacttcaacttccacctcctgggttccccgcgattctcctgcctcagcctcctgagtagctgagatgacaggcgtccaccacaacacctggctaatttttgtgttttttagtagagacggggtttcaccatgttggccacgctggtctcgaactcctgacctcaagtgatccacccacctcggcctccccaaagtgctgggattaccatacctagcctaatctgctttcttttgacaatgcaaatgttttctttacatgtcatggaatggcttaaatcaactaatgctgtatttagggctgtgtggtggatatgactctggagatccattctttgggtggcagatgtgggaaaagaggcttaggaaagaaccttgcttctaatggagccacagccagtcccctgctgtccccagcagcgaagccctgtgcagcaaggatgtccacacactacagggctctcatctcccgcttggtcaataatgaagtggcagtttcatctttttaggtttttgtaatctatatgtttttaaatgttggccaggagacactattctgaagagtgcagcctggaattcccatcaccgcctccgtttctaatcttctcaagcctcctggccactctcagcaggtaactagcatcttagtcaatgagaagacagagctgacctggtgcattcctcaacttctcttcttttggtttcatagtctcctggtccctttacctcagtttcccccctgctccttcccacaggcctgctgctcccgtctcctggcattcttcctcctgccccttctgcctcttctgggacctcaccaattgggaccccctcagtggtcttttcatgcttatgttttcagcctttcctcccaccaaagtcagggttacagaaggaagagaaggaggcagggagggagggaaaaggaaaggaaaggaaccacaatggcaccttgcctctgccacgctcctctccgatcgcctcctcaacaaagacgtcagattcccctctttgtaatgtcttctttgaatttcagcagtgtgggggatgttatgcttttgccttactccgccttatattttggctgtttgtgagctagtccaagccctattggactataggtgccttgagaaagagtgccacagtgccagggctgtgtctgctgcatgctgtttgtgagcttgtccaagccctattagactataggttccttgagacagagtgccaccgtcctggggctatgtccgcagcgtcagtatccaaggcctattagactataggttccttgagacagagtgccacagtgctggggctgtgtccgctgcgtcagtgtccaagccctattagactatagggtccttgagacagagtgccacagtgctggggctgtgtctgctgtgtgctgtttgtgagcttgtccaagccctattagactataggttccttgagacagagtgccacactcctggggctgtgtccactgcatcagtgtccaagccctattagactataggttccttgagacagagtgccacagtgctggggctgtgtctgctacgtgctgttggtgagcttgtccaagccctattaaactatgggttccttgagacagactgccacagtgctggtgctgtgtccgctgcatgctgttggtgagcttgtccaagccctattagactataggttccttgagacagagtgccacagtgctggggctgtgtctgctgcgtgctgttggtgagcttgtccaagccctattagactataggttccttgagacagagtgccacagtcctggggctgtgtccactgcatcagtgtccaagccctattagactataggttccttgagacagagtgccacagtgctggggctgtgtccactgcatcagtgtccaagccctattagactataggttccttgagacagagtgccacagtgctggggctgtgtctgctgcgtgctgttggtgagcttgtccaagccctattaaactatgggttccttgagacagactgccacagtgctggggctgtgtctgctgcgtgctgttggtgagcttgtccaagccctattagactatgggttccttgagacagagtgccacagtgctggggctgtgtccgctgcgtcagtgctcaggtctcctttgtccaaatgaaatgtgtgctgtggttttaaaaatgattctctgctctcgaactcctgacctcaggtgatccacccacctcggccagcctggccaacatggtgaaaccccctctttactaaaattacaaaaattagtcaggtgtggtggcaggtgcctataatcccagctacttgggaggctgaggcaggagaattgcttgaactcaggagtcagaggttacagggttgcagtgagccgagatggcgccactgcactccagcctgggcaatagagggaaactgtttcaaaaaaaaaaaaaaaaaaagaatctctgggctgggcgtggtggctcacactgtaatcccagcactttgggaggctgaggccggaggatcacttgaggtcaggagttcaagaccagcgtggccaacgtagtgaaacctcgtctctactaaaaatacaaaaattagccaggcatggtggcgggcgcctgtagtcccagctactcgggaggctgaggcaggagaatcacttgaacctgggaggcggagcttgcagtgagctgagatcacgccactgcactccagcctgggtgacagggcaagactccatctcaaaaacaaaaaatgaaaaataaaataaaaattaatctctgtgttatctagtagagctgtgattcgggaagagtaagaccacccaattacctttcacgtaagcagatggtattaggtcagagaagcctcacaacgcaacagagtcaggaggcagtcagctgactgggcaagtatgttagagggggaattatagaaaatgatgtattcataaaggtgttatctgaaattaaataatacaaatgtatttttattcattgatcttacgaaccacaaagggccaaggctctctctttgagttttcaattcaattaatttgacttccacgaaccacattcgtattaacagttcagtttttgctttgaatttcttcaaagagatttaagagcttaaaaaaacactttacaaccaactgggtatagactttttctagattcttacagtattttccactctataattcctcattcacacaaaattcaacatcgttaaaaaaaatttttttttttgagacagggtctcactctgtcacccaggctgaagtgcagtggcgctatcttggctcactgcaacctctgcctcccaggctcaagtgatcctcccacttcagcctcccacgtagctggggcaacaggtgcgcaccaccatgcctggctaatagtttatatttttttgtagagatggggtttcaccattttgcccaggctgctctcaaactcctgagctcaggcgatccacctgccttggcctcccaaagtgctgggattacaggtgtgagccatggtacccgtccaaaaaatcctcattttttatcacatcttttcaaagcattgagttgagtttttataaaaacattaactctctttacaaaatcatttcattggcttatacagtattttatgtttttatttaaaataacaaggggcagaaaccaatttaggaggaaacacagctgacctattaagaactatgcagctgattctttttggagcaaaagtgcacaaactagaccacagcctccactaaccacgagccctcagcgtgctgtgggcgtcaggcagaacttcttatgcaggtgacccagagcattgctgaacctggccaggtggtaaggcagtggctcccaaacttagctacacattagactcacctggagggcttttaaacgcatcccagagtgcgtgctgccctccagcccaattaaattagaaaggctgggagtgggaaccagacgtcaatatttcttgaaagattccagggtgattccaacgggcagcaaagtttgggaggaactacgacggtgcgggaaggcgagttaaaagagcttctgcatgctttctggttagcttcggattttcatcttagatttagcattaattttctatgagatcttgggtgatttatttaacttctatgagcctcagtttccttatatgtaaaatggggctaatttctgcattgtgggatattataggaattaagtgatattaggagaatttaggatttcctgctaccttccaggtgcttaataaagtgtggctcaggcgtaggagacgttattatattgtttcctgtgggtagaataaggcatgtgggtaatttggtttggtcaaagtctagacttaaaatattgcatattagaatataactaaaggattactcaaggcagactgagttgtgttcctttaaccctgcagtcttgacctcaaaatctggaaagtcagtgaggaacctgcttcttacctgctattaattatcacctattgtgttcatttgctgtgtaactacactttctccccagccgccggaagtgatggaaattcttgataatagcaagtggcctgtgctgactcaccttgtactatttcaagttaagcaccatgtgtgaaattcacaattctgtgcctacggcaactccaataggcacggagcagagagtagattttccattgtctaaatgtgactcttactttgagtcacgcaggtataattataggtattttatattatcatcctcagcacagtctaaactgtgccttttgttcttgtgttctgttttactacatgtacattatccattttattccattacatcaaatggactgttagagtcagaattggtctctgtctttgccctttaatctgtggtgcatgtggaatatctgagcttctcctgtctatataattaggctgcaaaacagatgatattttgctttaaaaataactatttccatagcacgctgctgtgacccaagcttgcagggtacaaaatagcataaaacagaagtgacacattatatcttccccttaaaggggttttactgggaatagttgaagagaaacaaaatataacatccttaatgtaaaaagttctttgccatagacgtgccagtagctggagagctggaattgcaatgctttctttaagtatttctcacctttttttctcagtactagatatggaatttgaggataggaaggggtggaggcagattagccttaggacagtggttgccgaatattttcatcctacagcatgagcagtgctgcatcagccttgtccttcgggctcttctgcagacgcgtggatgcctagatccctcccacgcaccccgagtgccacctgcaatggtccagacacacgcgggtcccacacgctctgctcgctttttgtaccaacacctttcaatcttgccccaaattacttggcctccacaacagctttgggaagtttccatctctgcctttgccattttccttctgtgcagagtagggaaaggcagagggaagagttgctgtcctggcagtaacaggaggcaggccaggtatgaggctgtaagctgggccgcctggaaagatagggatccagaggcctggaggagcagcattccgctgctgcctgggattgaggcggggggaagggagacagccaaggagtgggtgatgtacccagagacacgcctctctggaagagtggggcctggggcaaaaaggcggccttctccggctgcttcgtggagctgatggaggccgcaggatgtagttgagagctcaggtcttgcagtcagtctgtggtttgaatcctagctctactactggctgcaggatcgtgagcaagttttttttttttttttttttttttttgttgttttttaacaactttaatgagatatacctgagctacaataaactgtacatattaaatcatataacttgatgttttatcatatgtatatgcctatgaaaccgtcctcaatcaagataatgaatatattcttcacccccaaaagtttcctcgggagccttgcaatccctgcctccagctcctcttccttcctgtctccagacccaggaaccactgaactactttcagtttctagacattagtgtggatttcctagaattttatgtaaaaggaaacatatcttgcagacggtactctcgtgtgtggcttctttcacttagcataatgattttgagatgtaatcatttcattgcctgtatcaatagttcatatatttatatttctgcataatagtccactgcccagatataccacagttggccgatccattcatctcttgatggacatttctgttgtttccagtttggggatattacaaataaaagtactaaaggttgagcatccctaatctgaaaattcgaaatccgagatgctccaaatctgaaactttgtgagcgccaaatgacatcacaagtagaaaattctacatctgaccgcatgtgacaggtcacaggaaaaactttttgtgtacaaaattatcaaaaatattgtctaagattatcttcaggctgtgtatataaggtatatatgaaacataaatgaatttaatgtttacgttgggtcctatttccaagatatgtcattagatatatgcaaatactccaaaatctctggttccaagcatttcagataagggatattcagcttgtgtgagcatacatgcacaagtctttgtatggttatatggtttggctctgtcctcgcccaaatttcatgttgaattgtaattcccagtgttgggggagggacctggtgggaggtgattacatcatgaggatggatgtcccccatgctgttctcatcatagtgagttatgagatccggtggtttaagagtgtgtggtactctcccccctgctcactcgctctctctcctgctctgccatgggaagatgtgtcttccttcactgtgagtcaatgaaacctattttcctcataaattacccagtctcaggtagttatttatagcagtatgaaaacagtctaatatatatatggacatatattttctttcctttggggtaaaaacctatactagaactggaatcttatcaatgtctgggaatatttgaaaaaaaaaaaaagaaaaactggaatggctgtaccatatagtagatgtttaactttttaagaaatttctcagctgtttcccaaagtgcttgtactattttatatggggagttcccgttcctccatacccccaccagcatttggtgtggtcagtcttttaagttttgcctgtttacatagtaggtttgtaatagtgtcttgtggttttagtttgcacttcgctaatgaccaatgatgccaagcatccttctacacgcccattcggcatccatacctcttctttggtgaaatgtcccttcaaatcttctgtccttttaaaaattgttttgaaagtttttaatatattctggatgcaaatcctttataagatatagtatttgcaaatattttctctcagtctgtggcttctctcttcattctcaacagcatcttttgaaaaacaaatacttgtttttttatgaagtccaatttatatgttcttttatgaatcatgtttttgctgtcacatctaagaaatctttgcctaacccaaggccaaaaaggtttcttcttatgcctcctctagaagttttgtaattttaggcttcaaatttaggtctttgatcaatttttagttaatttttgtatattttgcaatgtatggactcaagtagtttttttcaggttgagggaggttaggtgtttttttgtgtgtgtgtatgaatatagtatccaaaatttccagtatcatttgttgtaaaaagctattatttctctactaaattacctttgtcaaggattagttggccatatttatgtgcaactatttctagactctgttctgttccattgatctatttgtctatctttacaccaataccacactgttttgattatggtggatgtataataggtcttgaaattaggtaatgttaaccttccaactttgttcttattttttaaagttgttttggctattcagtgtatttggcatttccatacaaattttagagtcgctttctaaatggattacgtagaaaaaatttctatcaaagaagtctaccaggattctgattgggattgcattgaagctatagcaacttggagatgattgacctcttcacagtattgagtgttctgacccaggagcacagtatctctctctagtttaggtttttattagttcccttcagtaattttttaaagtaggaaaaagctattatttaaacatgtatttcttttatattgatatataattacacatatttatgggtgatattttgatgcacgcatacaatgtgtgatgatcaatcagggaatttaggagattcatcacctcagttatcacttatttgtgttgggaacatttcattattttcttctagctatttgaaaatatacaataaattattgttaactatagcctcctactgtgctatcaaacactacggcttcctccttttatttaactgtgtatttgtaactgttaacccacctgttttatccccctcccccggcaccccacatcccgccccttcccacacacacacattcttcccagcctctggtatctaccattctcctctctacctgcatgagatcaactttttaagctcccacatatgagtgagaacatgcaatatttgtctttctgtgcctggcttatttgacttaacataatgacatccagttccatccattttgctacaaatgacaggatttgagtttttgtataactactagtattccattgtgtatatagagcacattttgctacaaatgacaggatttgagtttttgtataactgctagtattccattgtgtatacagagcacattttcttggtcccgttccattcatccatccattgttggacacttaggttgattctgtatcttggctgttgcgaatagagctgtgataaatataggggtacaggtatccctttgatatactgatttctgttcctttggacaaacacccagtagtgggattgctagatcatatggtagttctcgttttagtttttttttgagaagcatctatactgttttctatactggctgtactaatttacattcccaccaacagtgtgtaagagttccctttactatgcatcttcactagatttcatggtgggttttttttttctgtctttctaataatagccattctgactggggtgaaattatatctcattgtggttttgatttgcacatccctgatgattagggacattgaacattttttcacatacctggttgccatgtgtatgacttcttttgagaaatgtctattcagatcctttgcccaatttttaatgggtttgtttgggttttttgctgttttgagttccctggatattaattccttgttgaatgaacagcttgcaaatattttttttccattctgcaggttgtctctttgctctgttgattgtttccttagctgtgcagaacgtttttagtttaacatactccaatctttctaattttggttttcttacttgtgctttcaaagtcttagccataaaatctttgcctggaccaatgtcccaaagcatttcccctatgttttcatctggtagagttattgtttttggtcttaatatttaagcctttaataaattttgagtggatttttatatatggtaagagatagcggtctagtttcacccttctgcttatggatatctagttttcccagcaccatttattaaaggggatgtcctttccccaatgcatgttcttggtgcctttgtcaaaaatgagttggctgtaaatagatagatttatctgtaggttctctattgtgtcccattggtctatgtgtctttttacgtcaataccagcctgttttatgttacagtagcttcctagtagtgtattttgaagtcagctagtgtgatgcctccagcttgtttctttgttttccagtattgctttgtgtgcaaggtttttctctgtgtgtttaaattccatgaagaatgtcatggatatttcgacagagactgcattgagtctgtagattgctttgagtaggatggtcattttaacaatgttaacttgaactcaggattcagaaactcactcaaaaccacacaactacatggaaattgaacaacctgctcctgaatgagtcctgggtaaataacaaaattaagggagaaatcaatgagaacaaaaagacgatgtaccagaagctctgggacaccgctaaagcagtgttagagggaaatttatagcactaaacgcccacatcagagagctggaaagatctcagatcgacaccttaacatcacaattaaaagaactagagaagcaagagcaaacaaatccaaaagctagcagaagacaataaataagatcagagcagaactgaaggagttggagatgcgaaaaacccttcaaaatatcaatgaatccaggagccagttttttgaaaaaaaaaattaaggaaatagaccacttcactagactaataaagaagaaaaggagaagaatcaaacagacacaatagaaaatgataaaggggatatcacccctgatcccacagaaatacaaactaccatcagagaatactataaacacctctgtgcaaataaactagaaaatctagaagaaatggataaattcctggacacatacaccctcccaagactaaaccaggaagaagtcaaatccctgaatagaccaataacgagttctgaaattgaggcagtaattaatagcctaccaaccaaaaaaagtccaggaccagatggattcacagccgcattctaccagaggtacgacgaggagctagtaccattccttctgaaactattccaaacaatagaaaaagagggaatcctccctaactcattttatgaggccagcatcatcctgataccaaaacctggcagagacacaacaagaaaaaggaaacttggccgggcacggtggctcacagtggctcatgcccataaccccagcacttaggggagccaagcaggtggatcacttgaggtcaggagttcgagaccagcctgccaacatggcaaaaccctgtctctactaaaattacaaaaatagatgggcatggtggcgggtgcctgtaatcccagctaatcgggaggctgaggcaggagaatcacttgaacctgggaggcagagattgcagttagccaagatgaagtcagcttcatccctggttcaacatgcaaatcaataaacataatccatcacataaacagaaccaatgacaaaaaccacatgattatctcaatagatgcagaaaaggccttcaataaaattcaacacccttcatgcctcaataaactaggtattgatggaacgtttctcaaaataataagagctatttatgacaaacccatagccaatatcataatgggcaaaagctggaagcattccctttgaaaaccagcacaagacaaggatgccctctctcagcactcctattcaacatagtgttagaagttctggccagggcaatcagacaagaggaagaaataaagcatattcaaataggaagagaggaagtcaacttgtctctgtttgcagttgacctgattctatatttagaaaactatatcattggagcccaaaaacttcttgaactgataagcaacttcagcaaattctcaggatacaaaatcaatgcaaaaatcacaagcattcctatacaccaacaacagacaaacagagagccaaatcatgaatgaactcccattcaccatcgctacaaagagaataaaatacccaggaataccttacaaggaatgcgaaggaccccttcaaggagaactacaaacaactgctcaaggaaataagagaggacacaaacaaatggaaaaacatctcatcctcatggataggaagaatcaatatcgtgaaaatggccatactgccaaaataatttatagatccagtgctattcccatcaaactacactgacagtcttcacagaattagaaaaagctactttaaatttcatatgaaaccaaaaaagagcccatatagcaaagacaatcctaatcaaaaagaacaaagctgggaggcatcacgctacctgacttcaaactatactacaaggctacagtaaccaaaacaacatggtactggtaccaaaacagacatatagaccaatggaacagaacagagacctcagaaataacactacacatctacaacaatctgatcttcgacaaacctgacaaaaacaagcaatggagaaagaactccctatttaataaatggtactgggaaaagctagccgtatgcagaaaactaaaactggaccccttccttacaccttataaaaaaattaactcaagatggattaaagacttaaatgtaaaacccaaaaccataaaaaccctagaagaaaacctaggcactaccagccaggacataggcagaggcaaagacttcatgaagaaaacaccaaaagcaattgccaacaaaagccacaattgacaaatgggatctaattaagttaaagagctcctgcacagcaaaagaaactagcatcagagtgaacagacaacctacaaaacgggagaaagtttttgcaatctatccatctgacaagggtctaatatccagaatctacaaggaacctaaatttacaagaaaaacaaacatcaaaaagtgggcaaaggatatggagagacacttctcaaaagaagacatttatgtggccaacaaacatgaaagaaagctcaacatcactgatcattagagaaatgcaaatcaaaatgacaatgtgataccatctcatgccagtcagaatggtgattattaaaaagtcaagaaacaatagatggtggcaaggctgtggagaaatagaaacgctttcacattgttggtgggaatgtaaattagttcaacttctgtggaagacagtgtggtgattcttcaaggatctagaaccagaaataccatttgacccagcaatcccattactgggtatatacccaaaggaatataaatcattctactacaaagacacatgcacacatatatttattgcagcactatttacaatagcagagacatggaaccaacccaaatgtccatcaatgatagactgcatgaagaaaatgtaatacatatgcaccatggaatactatgcagccataaaaaagaatgagatcatgtcctttgcagggacatggatgaagctggaagccgtcatcctcagcaaactaacacaggaacagaaaaccaaacaccacacgttgtcactcataagcgggagttgaacaatgagaacacatggacacaaggaggggaacaacacacaccagggcctgtcagggggttgagggaaaggggagtgagagcattaggacaaatacctaatgcatgtggggcttaaaacctagatgacagtttgatgggtacagcaagccaccatagtacatggataactatataacaaaactgcaggttctgcacatgtatcccagaacttgaagtaaataaataaataaataaataatattaactcttctgatccatgagcatgggatgtcttttcatttttttctatgttcttcaatttttttatcagtattttgaagtttttgttatagaggtatttcacctccttacatttattcctaggtattttttagtagctacagtagatggggtagctttcttggtttctttttcaactatttgttgctggtgtgtagaaacactactgatttttgtatccagccacattaccaaatttatcagttctcagagtttttggtggaatctttaggttgttctaattattatatgccatctgcagagaggaacaatttgactttcgcttttccagtttggatgccttttatttctttctcttgcctaattgctctagctaggacttccagtactatgttgaataacagtggtggaagtgggcatccttgtcttgttccagttcttagaaaaaaaaggcttttagcttttccccacttattatgatgttagctgtgggtttgtcatatatgacctttgctatgctgaggcatgttttttctatgcctaacttattgagagtttttatcatgaaggatgttagattttatcaaatatttttcctgtgtctattgagatgatcttgttgttttagtctctcatatgttgatgtgatgtgcacgtttattgatttgcatacatcgaaccatcattgcatccctaggataaatcccacttgattatggtgtattatgttattggtgtgttgttagatttggttcgctagtattttttagatgatttttgcatctatgttcatcagggatattggtatctcattttggtattaggataatggtggcctggttgcgtgaattaggaagacttcccgcctcttcaatttttggaatagtttgagaagaattggttttactttactccttaattctactgaacttttaaagtcctgggcttttctttgttggggaactttttattactgattaattcttgttactcattatttgttcagatttttttattcttcctgatttaatcttgtaaggctgtatgtgtccaagagtttatccatttcacctgagctttccaatttgttcgtgtgtagttcttcataagactctaatcatttgtatttctgtggtatttttttcatttctcattttttaaaatttggatcttttttcttggttagtctaacagtttaatcaattttggttcctttcaaaaatcaagcttttattttcttgatcctttgtaatttttgtgtgtgtgtgtgtttatttcgtctctgatctttattctttcttctgatttttggctcagtttgctttggcttttttagttccttgagatgcatcattcggttgtctatttgaaatctttctccttttttgaggaaaacatttattactctaaacccctcttactactgcttttgttgtatcccgtaggtttaggaatggtgtttttccattttcatttgttttaagaaaaaagattttatttcattcatttaggagcatgttttcatgtaggagcatggttttaaattttcatttatttgtacagtttctaaagttcttgttattgatttcgttttactgaattgtgatctaagatgcttgatatgatttcaacttttaaaaatgtgttgagagttattttgtggtctaacacatggtctatcatggagaatattccatgtactgataataaggttgtgtattttgcagcacttgaatgaaatgctctctaaatatctgttcgatccatttggtctgtagtgcggattaagttcaatgtttctttattgattttctgtctagttgatctgtccagtgctaaagcggagtggtggaccaggaccaggcacattggctcacacctgtaatcccagcactttggaaggccaaggcgggccaatcacttgagctcaggagtttgagaccagcctgggcaacatggtgaaactctgtctctagaaaaaatacaaaaactagctgggtgtggtggcatgcacctgtagtgccagctactccggaggccaaggtggaaggatcgtttgagcctgggagattgaggctgcagtgagccaagatcacaccactgctctccagcctgggtgacagagtgagaccccataccaaaaaataataaataataaaatggagtggtggaggcctcaactattactgcattggggtcaagctctttagctctaatgataattgttttatataatatatctgggtactccagtgttgactgcatatatatttacaattgttatagtctcctgctgaattgttccctttatcattatattaatataatgaccttatttgtcactttttatgttttttggctaacattgtattttgtcttatgtaagtatagctactctggcacacttttggtttctattttcatggaataattttttccatcccttcattttcattctatgtgcatctttacaaatgaaatgcatttgttggagacagcatacagttgggtcttttttttttttttaaataaatccattcatcttgtctatattttttacttaaggaatttaaactgtttacattcaaggatgtcattgataggtaaggacttacttctgtgattttgtaaactgttttatgatggttttgtatattttttgttcctttcttcctcttgtattgcttaccttgatgatttggtagtttattgtagtgatgtttgactcctttctctttctcattcgtgtatctgctctcccagtgagtttttcagtcttgcgtattctcacggtggtagttattgtccttttgcttccagatgtagaactccctcaagcatttctcacagggcctgtctagtggtggtgaattccctccattttttcttgtttgggaaagactttacttttcattcattttttaaggatagctttcagcaatatttcatctttttttaaggatagctttcagcaatattttatggtttttatgtacacattttaatcatatctctaaatcatgtgtttgatgttgttgtaaatggtatttttaattttttttgagttggggtgacagagtgacacccaggctggattgtagaggcacagtcatagctcactgcagcctcaaatttgtagtgttcctgccacctcagcctcctgagtagctaggattataggcacatgacatcatacccagctaatttctttttgtatcatttttctgtagagatggggtctcactatgttgaccaggctggtcttgaactcctggccttaagtgatccttctgccttggcctcccaaaatgctgggattaccggtgcgaggcaccacacccagccttatgttttaatttctaattgtttgttactatgataaagaaatgcattgatttttgtccattgacctcatatcctgcaaccttcctaaactcacctattagttctagtaccttttttgtggattgcatccattagatttttctataggtgactatatcaccaatgaagatcatttgactttctttccaatctggatatcgttcatttattgtacttgccttattgtactggccaggacttccagtataatgttaaatggaaacggtgagagtggacatgcttgtcttgctcccaatcttagagggaaggcatttagtcttttaccattaagtatgatgttagctttagtttttagtagataccttttattaaattgaggatattgccttctacttatatattgctgaggattttttatcaggaatgactgaattttggtaaatgctttttctgcatctactgaaacaatcatatagttttcctttcagtttgttaatatggtaaattatattgattaggttttttttgttaatcaaccttgcattcctgaaataaacctcacttgctcatggtataaaaccctttgtatttgttgctagatacaatatttttttgagttggggtctcactctgtcacccaggctggagtgtagtggcatgatcacagctcactgcaattttaaactcctgtgctccagcaatccttccttccatctcagcctcccaactagctaggattacagtgtgcaccactgtgcccagctaattttttatactttttttgtagtgatgaggtcttgctatgttgccctggctggtcttgaacttcgggcctgaagcacctcagcctcccataatactgagattgtaggagtaagccaccatgcctagccctagatacaattttctaatatggctctttaatattttatttagaatttttttggcaatgttcatgagggatattgttctgcaggtttttgtgtttttttttttttttcaaacaacatacttgtttgcttttggtatcagattagtatagtatagcttgggaagtatttcttcctattttcaggaagactttgagtagaactgttattatttcttccttaaatggtgggtagaattcaccagtgcctccatctggtcctagagttttacctgtggaaaggttgtgaactacagattctatttctttaatgaatctagggccatttttattatctattacctcttgaaagagctttggaatttttcatctttcaagacatttttccattcttacacattgtttaatttactggcataatgtttctttattatctttttgatatctgtaggaactttagatgaggccatctcattcctgatattgatcatttgtgtctttctttttcccagatcatttgtgctagggatttacaaattttgttgatcttctcaaagaaccaacttttgattcatcgacttttctccattgtttttggttttctgtttcgttgatttctgctattttttttcctttctgctatttttttttcctttctgctattattttgtctataatttgctcatctttttctaatttcttaaggtgtaagctgagatcattgatttgaagccatggttgctttctgatataggcatttaatgctatacgtttgttttaagtacatcttcagggttattcacaaatttggatgggttgcattttcatttctattcacttaaaaagactttaaaattttcattttgaatttttccttgaccataggctgtttggggccaagttgtggagtttcagaatatttggaggtttttcagatattgttctacattgacttctaatttaattccattgtatcaggcaacatgctttgagtgacatgaatccttaacatttatttagacttgttctgtggaccagaatactgtgtatcttggtaaatgctttgtgtgcacttcaaaagaatgtgtattctgctattgttgggttgaatgttctgtgtcaagtagatatttgatagtattgttcaaatttatatccttatggttttctgtctacttgtcatatcagttttgagatgggggtatttgaaattgccaactataattaaagacttgtctgtttcttcatgcagttctaccagattgttcttcatggattagaacatgagccacataaatttttttattatgacctcttgatgaattatctcatttctcattatagaacgtttttttttttgactctaacaacatttttcatcttcagtcttttttggcatttttaaattgtgtgtcatagttgtacatatttttggagtacacatgatattttgatgcatgtatacaatgtgtagtgatcaaattaggaaaattgggatattcatcacctcaaacatttatctttgctttgtgttgggaatgtttattattaactatagttcttctactgtactattgaatactaaaactcattccttttatctaactgtatgtttgtacctgctaaccaatttctctttatcctaccctctgcccttcccttcccagcctctggtagccactcttctactctctatctccatgagatccactgttgtagctcccacatatgagtgacaacatgggatatttgtctttccatacctgacttatttcatttaacataatgacttccagcttcatccatgttgcttaaaatgacaggatttcattatttttatggctgaataatattccattgtgtgtgtgtgtgtgtgtgtgtatctatctcacattttctttattaatttacccattgatggacacttagactgattctatattttggctattgtgaatagtgctacaataaacatggtagtgcagatacctctttgatatactgatttcttttactttggatatatactcagcagtgggattgctggatcatacagtagttctacttttaagttttttgagaaacctccagaatgttttccatgatggctgtactaatttacattcccaccaagtgtatgagcattcaccatttcctgcatcctctccagcatttgttttttgtctttttgataatagccattgtaactgaggtgagatgatagctcgttatggttttgatttgcactttcctgatgattagtgatgttgaacatcttttcacatacctcttggccacttgtgtgtcttcttctgataaatgtctattcaggtcttttgctcattttaaattggattatctggggggttttggcccattgagttgtttgaattcctcatatattctggttattaatcccttgtcaaataatttgcaaatattttctcccattccatatgtaggttatcttttcactttgttgtttcctgttctgtgtagaagctttttagcttgatgtaatcccacttgtctatttttgcttttattgcctatgtttttgaggtcttaccccaaaaatattcgccaatgtcctgtagtatctccccagtgttttctcccagcagtttcatagtttcaggtttaaatttaagtccattttgagttgattttcataatgtgataaaaaatgaagctctagtttcattcttctgcatatgaatatccagttttcccagcaccatttattaaagagattgtcttttccccaatgtatgttattggtgcctttgtcaaaaatgagttggctgtaagtgcatagatttatttctgggttttctattgtattccattggtcttctatgtgtctgtttttatgccagtggtatactctttgcttactatagcttgtagtataatttgaaatcagatagtatgatgtttccagcctggttatttttggtcagtattgatttatctactacgggttttttgtgattctataagaattttaagatttcttttttctatttctgtgaagaatgtcatgagtattttgatagggattgcagtgaatctgtagattgctttgggtagtatagacattttaataatattaattcttctttgagcatgggatatttttccatttatgtgctcttcaatatctttcattggtgttttataatttttcttgtagagatctttcacttctttggttgaatttttactaggtatgtttttgtagctgttgtgattgctttcttgatttcctttcagattgatcacagatagcatatagaaatgttacacattttgcgtgtttattttatatcctgcaactttattaaactcatttatcagttctaaaagttttttggtggaatctttagatttttctaaatataagatcatgtcatctacaaacaagaataatttgacttcttcctttctaatttggatgccctttatttctttctcttgccctattgtgctggctaggaattctagtactatactgaataattacagtttatagttcaccactgagcatccttttcttattccagatcttagtgaaaggttttctattttaacctattcagtatgacataagctgtgagtgtgtaatatatgacacttatcttgttgaggtatgttccttctataaatttgttgaggattttcatcacgaagggatattgaattttactgactacctttccagcatctattgaagtaattcatatattttccttgattctgttgatgtgtgatgtattaaacttatttgacttacatatgttgaactatccttgcatcactgggatgaatcctacttgattatggtgaatggtctttttaatatattgctgtcttctgtttattggtattttgttgaggatttttccctctttttatcagaaatattgtcctgtagttttcttttgttatctttggctttggaaataaggtcagggtggccttgtagaatgagtttggaagtatttcctcctcttcaattgttaaaaatagtttgagtagaattggtattagttattctttaaatgtttggtagatttcagcagtaaatccatcagttccctggcttctctttgatgggagactttttattactgttccaatctattacttgttattggcctattcaggtttttatttcttcacagttgagttttggtaggttatatgtttccaggaatttttccattttttcctagattttccaatttattggcatatagttattcataatggtcgctaatgatcctttgtgtatctgtagtatcagttgtaatgtcatctttttcatctctgattttatttagttgggtcttctgttttttcttagtctaactgaaggttttaaaattttgttgcttttcaaaaaaacaaactttttattttgttggggttttttgtattgttattttagtctcaatttcatttatttctgctccatctttactcatttttttcctactaattttaggtttggtttgtttttccttttctagttcattgaggtgcaacattaggttgtttatatttggagtctatatttttaatgtaggtatttattgctatagaactttccattagtgctactttttctgtatcccgtgggttctggcatattgtatttccattttcatttgtttcaagaactttttaaacttcattcttaatttcttcattgacccattgatcatccaggagcatgttattcaatttccatatatttgaatagtttccaacatttcttgttatttatagttttattctgttgtggttagaaaagatacttgatatgattttgactttttaaaacttgttgagacatgttttgtggcctatcatatggtctgtcctggagaatgttccatgtactgatgagaagaatgtgtattttgtagcagttggatcaaatgttctgtgaatatctgttaggtccctttggtctagagtatagtttaattctgaggtttctttgttgatttttctgcctgaatgatccacctattgccaaaagtgaggtgttgaagtcccttactgttattgtattgtagtctacctctcctgtttagatctactaatatttgctctctctctctctctctctctatatatatatatatataccctgctatttggttatatatattcataattgttatatcctctttcagaattgactccttgctgaattattatataacaatttcctttgtttctttatatagtttttcacttaaagtctattttatctgatcgaagtatagctagtcttgatcatttttggtttccatttgtatggaatgcttttggtttccatttgcatggaatgcttttcccatcccttcactgttagtctatgtgtgtctctataggtgaagttagtttattgtaggcaacatatacttgggtcttacttattaatccattcagccactccatgtcttttatttggagaatttagtccatatacattccatgttattattgataggtaaggccttcctactgccattttattacttattttctagttgttatatagtgtacctccttacttcctttcttatttttgtggttaagtgattttctttgatagcatgttttaatttgctgcttttattttttgtttatcaattatagatttttgctttaggttaccatgaagcttacaaaaacatcctgtaattataacaagttatttaaaagtgataccaatttaacttttcattgtagcagaagaaaagaaacaaaaagaaaaaaacacatgcattttaattcccttctgttcctacattttaaatttttgatgtcacaagatcaaaatttgcctacctcaaaaattttatagttgttatttttaatagttttgtcttttaatcttcttaataaaattttaaatggtttagatgccatgattacaatataacaatcacattagcattatttttcctatgcttttaagaacttctttagcatttatcataggctaggtctggtagtgatacgttttctctggaaaactcatctctccttcatttctgaggaataactgcttggtgcagtatccttggggaacattttttttttccttcagcactttgaataatatcatctcactccctcctgacctgtaaaatttctgctgagaagtctgctgccaggtgtatttgatgtccgttgtatgttatttgcttttttcttgctctctcactgtttttaggaccctctttgcctttgacctttgtgagtttaattataatatgtcttggggtcttctcacttgggttgaatctgatcggtgacttttgacctttgtgtacctgaatatttatatttttctccaggtttggaaagttctgtgttatttctttgaataagcttgcaacttcttgtctttctcagttctctctttaattccactaacccaaatatttgctcttttgatgttggtccataggtcccataagctttgttcattccttcttattcttttttttctcttctgactgtctattttcaaatagtcttgtctttgagctcactgatcctttcttctttttgatcaattcctctgatacgctctattgcatttttcatttcatttattgaattttttacctccaggatttctgtttaattttattttttaaatcttttctgtgaactttctctgagagatttctgtgagctttcttgaagttcactgagcttccttaaaactgctattttgaattatttgtctgagagatcacatattttcatcactttagggccagtcttggtgccttactttgtccctttgacatcatatttccctgaatgttcttgacgcttgaagtatgatgatatctacacattgagagattaaatattttagtcttcctagtctggctttgtttgtgcctgtacttcttcagagggtcttccagagattctaagccaactgactattgtgttccctgtgatcaccacagtaatctcagcattagaggatactctattccctggcttgctgtgagtctcacaatggctttctggcccaaacggacctggggaagacccaatgacggtacttgtgttatgtgggaacactggccaccagggacctgagtcctgaagactgtcctagtttcccagacaagtctacttcccagcaggtctctgcacaggtaggttgtgtccccaactatagcaagaggggcagaagttgagactggaccccttcagaatctgctgtgggaaggaggctgatgggcctttctcattggctgagacaggcatgtgttactcagcaagtctctgcacaagtggagtagtttcttgcccataacaggaggagctaaagccaagactgggcctcctcagggtctgctataagatggagggtggccgggtgcctgtagtcctagctactcgggaggctgaggcaggagaatggcatgaacccaggaggcagagttttcagtgagccgtgattgcaacactgcactccagcctgggggacagagcgagactccgtctcagaaaaaaaaaaaaaaaaaaaaaaaaaaatggaggctggcatacctgccacattggctcaaatgggcatgcatcttctagtaagtccctgcatagacaggatagttccccaactatcagcaggaggagctggagcagaatctgggccctcataagatctgctgtgagacagatactgaaggggtcagtctcagctcagaggggtgtgtgtcacccagcaagttcctgtagagatagaatagttatctgattacagagagagggtctggagctgtgactgggccctcttgggatctgctgtggaatagaagctggagagcccagtcttgtatcagaaggcatgtctttcccaggaggacactgcatcaataggatagttccacgactgcagcaggaggtgctgtacatgcctctctgcgggtcttagcacaaatgggataggtctttgactgtcttcagtctcttttgtctaatattggtagatccactccagctcttatggttactgtttgccttatccacacttacacgtttaaatgattgtttatttctatttgaagtgtatttctcaagcatatagtagagcctcacttttttatccaatctgacgatttttgccttttaataagggtattttagactatttcaatttcatatgattattgatatggtttggttcaaaatattattttctgttttctatttgtcccatctgatctttgttctctctctctcttttttgctttcttttggatttatgaaacatttaaatggttccaatttccatcttctgtgggtttattagctattacttttattgtttaattattgctttagtgtttgtaatatatatgtttaagttaccacagtctaatttaaagtgatattataccacttatataaggaataaaaaccttacaatagtatacttccatttctcccgtctgacttttgtgttattgctatcaaacattttaattttacatatgtcatcattcacacgttacattatgatttttgttttaataataatcttttaaagagatttaaagtaataaaaattacatatttacccatgtggttatcatttccaaagctcttcattcctttgtctatattccttgtgtttttgcttatggtgaattcttttaggatttttaagtcaaaaaatatctttatttcccttttgttttggaatgatacttttgctgggtgtatatttctaacttgacagtttttagtactttaaaaacattgctccactgtcttctcacctgtatttccaatgagaaatctgccgtcatccttatctttgttcctttatatgtaacgtgcttttttctctctggctcttttcaagatttttctttatatcactggttttgggcggtttggttatgatgtgccttgatatagtttcttcctttgtgcttggggctcacttagcttcttggatacatgggtttatgactttcattaaatgtggggaagttttagccattatttttctcaaatattttatttgtaccacactctgtcttctcctttagggactccaattacacatagcaggcacttgaagttgtcctacagctcttttttttctgtgttttatttgttgttttttttccctatatattttattctgaatagttttattgctagatcttcaaatttgctgatttttcattctgcaatatctaatctgccattcatctcatctactatattttttttatctcacacattgtagtttttatctctagaggttcagttttgtgtctttttaaatatatattccatgtttctacttaactttttgaacatctgaaatacagttgaaataactgttttaataaatagctgcttctgtcaattctaacatctatgctagttctaggttggtttcagttatctcttcattatgggtttcattttcccgagtctttactttgtaaatattcttaagctttgttttagaatgcagttgcattacttggaaacagtttgatcatttttttgttttgcttttaatatgtgttaggtgggatcaggtcagtgttcagtctgtggctaagtatgggaaagacttctgggtattcaacccaatgccctgtgaattgtgaagttttccaggctggctgttaggaagtggcactattcctggctttgtgtgagtgctgtgcaccattatctccaatctttttaggtagttaatttctgagccttgaatagttttctcacatgaatgttgtgttagtcccttttgcattgctgtaaaagacacctgaggctgggtgatttataaagaggcttattctgctcacagttctgcaagctatacaagaagcatggcacccagcatctgcttctggtgaggactcaggaagcttacgatgatggtggaaggtgaaaggagagtaggcgtgtcacatggcaagagagagcaggagagagaagggggaaggtgccagcatcttttaaacaactagcttttgcatgaagttaaagagcaagaactcactcattaccatgggaagggcactaagctgttcatgagggatccacccccaagacccaaacacctcccaccaggccccatctccaacactgaagatcacacttcaacacgacgcctgtgattctcagtgttggaacctgctgggaggtgtttgggtcatgggggtggacgacacatctccaacattgaggatcacatttcaacatgagatttggaggacacaaacatccaaactacatcaggtgtgctgatcagtactcagctgaacacttgagggaccttctgcaaatctctagagctctctcctctgcagtactctgtcttgtaaattgttgccaccttggtctccctgtacttcagcagcagaggtattcatgggcaagttgcttaagttttctgaacagttattttctcatcaatacagaaaggataatagtatttagcttatgattctactgtgggaactgaacgaaactgatgtttgtacagcacctggcacttggcagatactcagcaaatatttgggtcttccctgtctctgcacctggtcgttacttcttcctgatttttgtcttgggtttgcaacctgattcctggctgagctttaggttggtttctgtataacgatcaaccaaagcaggtaatcactcatgagccattcaggttttaacttgatgagtttcagaattctgctattcaaatggcatttaggtagaaacgtatcctcctgtaatttgacatttattttctccaaaatctcattcagttcaacctgcaagaattatttgaattcacttatttgtagtgtgaatgtcagtaggctttagaaggtcagtggtgcgtggtggaaagaatttaagaggaccaatgctatttgcaaccccagcgtgatttttctggggtttcctagtaggtcatgaacgtcaaccttttacttccccttctcattttgcctcagatttcccaaggagctacatgaagaacagatgagtgtttgtcagaacttaaccatttctcttttatcttctcccctgtggtagtgtctggaggtcgcagccgcctgcatctcattgatctcggcagctgtgtgaaagctcttagcaaaaatcgagaaggaggctcagggctgtgtctctcgctgtctgctctgggcaatgtcatcctggctctcgtcaatggcagcaaacacattccatacaagtaagtgactcttctactcaaagaatgtggtggggtaagcatggtgtgggacgctttgttcagtgccatctgtggagaggtgtgccacagagggacagcctggaccccattataagttcagtgccagagaccagccttagctaacagttgtgtaatgcatgatctcccaaattcaaaacttttggaaatacttaaatctattccagttctaactttaggctgctcaaattagaggaaataggaaattatctcagttgaggtctccactcgcaaatgaaggtggtgggtcattgtcaccataataaagatgtgcctgtttcatagtgatgagagtgaggggtggaagactggcttatccttaggggtagggccaccagacttaaccaaaaaaatataggatatccaggcaaattcaaatttcagataaccaacaaataaggttgtattataagtatgcaccccaacattgcatgggacgctcctggtgacatgtattttatctggcaacccaatctcgggagttcagaaagctaggggagttagcacctgccttcccatgcaaatgtttagtcacttccaggatccttcctgtctctttactactgctccaattaaattacagccgctcctatgtctggcagagacaaagccactccaccaccatcaccccaactaagcgttctcattggaccgtgtggtggcaggccattgactggctgtccaggcttctgccaaggcctagctgagcctcttactagctgcatgaaccttcattcttcctaaaatgagggttaaagctatacatgttacatcacagaaatataaggctcaaaatgataaaacatgtataaaagtttattgtaggctgggtgcggtggctcatgcctgtaatcctggcactttgggaggccgaggcgggtggatcacaaggtcaggagattgagaccatcctggctaacacggtgaaaccccatctctactaaaaatacaaaaaattagctgggcgtggtggtgggcacctgtagtcccagctactcaggaggctgaggcaggagaatggcatgaaaccaggaggcggagcttgcagtgagccaagatcacgccactgcactccagcctgggcaacagagcgagactccttctcaaaaaaaaaaaaaaaaaaagaaaaaaaagaaaatttattgtagaatttaggacactatggccaataaccaatgatgaaagtctggttacacctatctagtcaagcctatcctcacctatttaaagggaaaaaacaccgaccttacagagttgccatgaggtgaagattaactaaatatatgtggattcatggttttatctgtaaaaaccctacaaaacctacgttgctgttgtgtaggaggaaaaagtcgggcagtgtattctataattactgagattcacaatgagtgctggagtttttcttcccctcagccctatgttgatgccagacccccccaccaaatacattgtgagtttatttcctaccaggagaaccattactggactgactttaggagcttaaatggtgattataatcctgtccatctcatttctagaaatttggaatcctagttggataaacccagaaatggttttcccggctcttgtaacaacccttttctatgggagaatattctgagttgaagaattatagagtttcattcgatgtcatttctgtagttgagtaaattcagcttgtggggagaaagggcaggggagggaaaccgttggagttggagatgaagggaagagtactagcactcactggtttccataaaatgagaatcatgtctgttaatgtcagaacttcatagatcatgatatagataaaattccaaattgcaccttagcaggaggtcattgattacatatcttacttatagcttttacactgtttctgcagggcgacatgcttttatgatttctataaatagttgttgaattgatggcgggaagatagatgcatgtaaacatgaaattatttttaatttaaagtaacttccttttagttagagttgggttttttataaatgagtagggaaacattaaaaattgtttttatggcccagcgtggtggctcacacctatattcctggcactttgggaggctgaggcgggaggattgcttgagaccagcctgggcagcatggcaaaaacctgtctctacaaaaaatacaaaaattaaccgggcatggtgttgcatggttgtagtcccagctacttgggaggctgaggtggaagggtggcttgagtccaggaggcagaggctgcagtgagttgagattgcgctactgcaccagcctgggcaacagagtgagaccctgtctcaaaaaaaaaaaaataaatgaaagtttgtattaatcgttcaagcttcgtgttaattaagcatatttttaacatgctggccctaccaactggctacctgccctcctgggagacatctccactcaccagtccctgcagacagctgcctgccttcattccaggagtccccttccttctattctggcaccaagagagtgatcattaaagtgtttctgtgtctcaagtaagcagactagcttccatgcagtgtcagcacaagacccaatcctggagctgtcccgtggcctggttgagctgttgatggcgtgggtacagactcaccagctgcccttgccctgccctgcctaacacaactcatcgagaccttgctgggttgcctggtgctggaaacacggtggccctggccatccagccagcgctgtccttcccaaaacatccattggccagtgcgtttgttctgtcacccctcagtgtcctaatgcccttcattgtacgtgatcttaaaaagacccttgccgaaatgttttctccgagtctggaccacggcctagattcaatatttggcatctgcaaatgtacatttacaaagtgattcatcaactagaaactgtcctcttttgaggtacaggaagataaggcaaaggtttactcaaatcacccagccagtgggtggcaggatcaaactgcctcgctcctcacagcttcagaggcctcgacagttcccagcctcactgcagacccacgcccacttctcatcaagctcccgaaatgtcggagctgccttcactgcgcacggcaggggagcccagcacagcaggaaagccccgatttctttgatcaattccgtcagtgctctgaagccacattatgcagcattttgttagcatactaaacaccttcagggtgtcaagccttgtctttgcagtgcgttccttagagaagtggaagtttcctgcccttgaggtttcctcttactcctcctgctcacttacggagggtggcggggggaacaaaaatagaaaaccaaattccatattctctttccttcccccaccccccccaaaaaacacagacaccccactacctcttcatttgtctccccagacaactctgtacttggaacctgcattacttgtgcttgctcctgggaaattcgctgcaatgtgcacagaggggctgtagcctgtcttcattcctcttcatcatcttaccaggctatttgtcatgtgagcaagctggaaagtgagtttggattcattacccatcccaggcattcccacaggcaccctccatgtgcgctgaatgcttctgactttgcaaatgatattgcccttgaagatgcaggaggcgtggagcaggtttccaacctcagccattacacagcacaggcacattacatggcacaggcttgccggccagtccaggcgccataaatcagttctcaacggtggcaccattcagaaaagcatgcagggaaggcagggagaccaccaagggctccaacccctcgtcagttctgcactgacaggctgcacaaattactctctaatttttgagagcctccacctccagggaaccctgccctcattcgatcattttgacagtgcatttgcaaattttctttattcggtacattcatttgctgttccttactgctcttgggcaccaaggtgctaggaatcttcccatttaatggataagaaaaaataggcagaagcgttgaaatgacttctcaggccaaaacccagtgttgcacatcccacaggagttggcccccagaagaaccgccacaaggatctgtcagggtgaactgagcttcggctaacgggtgttatgtcccagctcatctgaaggaccacagcttttcgagactcagattctcaccatgacccaattatctcaaaatagaatttctggttctcttagatgttgctttgtagagggcacaggcccttagaaagcacacacctgtcatgcaggcgtccttcaagccctgaagcatttaccttcattgatgactgctgctccatatggagaaagaattcctttaatgggtcatatgacctgtttgcttatttgccaacacagtgtttctaaacactctgtttctaaacaacagctagttgctaatgtcttggctgccctttaacaagagttcatggaaagtccttctgtggccctctcatgtcatgcctgtctgagatgcttctcccagtcatcttgaaaaatggtgctacataaccatcctgtcgtggaaatgatgcccggcacctccctctcacgggtttggtctatggttcagacccagacctaatccttgtttgttgagatcagtcactgagacactttgggtctcagcagctgtgctgagctcgcctcctcctctctctggtagagcctgaggcaatctgtgatccaagctgcaggccacgagcaaacaccgcaggcaacatccacttccagaaggctgtgttccacaaaagcgatgaggacacccatcctcaggggctataatgggaactcttttcctcctaaggccctagtgaggagtcaggaaccaaggtcatctttaagcttgtagcatcgggacacaccagttcattcaaagcagcaggcagcactagaagctcaagttcaaatcagtgacttgaaaggaaatgacacttcataagtagaggcagctttttcaaaatgcaagcaccttctcatccaagagagggtggggttctggcacctgtgggtcacacttgtggcagcaggcccagcattggcaggaacttcaggacgagcctctgaaggatgtggacattcccctccttgcctggagaagtgcttcctcctagagcccatggagatttgggattagcctctcctttctcagaactggaaacccagtactcaaggtctgggaagctggggaaaggggctcaagattgctgttagctagagcggggttccaaacccccaggccacagattggtacaggtccctggcttgttgggaaccagcctgcacagcaggaggtgagcagtgggggagcatgaccacctgagggctgttggctgtctgatcagtggtggcactggattctcataggaacctcatgctattgtgaactgtgtgtgcgagggatctagcctgtgcgctccttatgagaatctaatgcctgatgatctgaggtggagcagtctcatccccaaaccattccctactcccattgggtccatggagaaattgtcttccacgaaacctgtccctggtgccaaaaaggtaaaagggtttgggactgcggagccatggcattgaattcccatctcacacaggagaggaaaggctcttcctcaggacttggatgtatattacttagacgtaccatgaaattaagtagatatttgccaggaaaaatgcaaaggagtatcagttctccagatttgtttaagatagcatgaaacggagaggttcatgtaagaatctgtgtgtgtgtgtgtgtgtgtgtgtgtgtgtgtgtgtgtgtgtgagagagacatatgcatatttaacctcctttaaatgtacattaatgctgtattttctccccctgatttacagggagaatatcaatttagaactatttgcacaaactctagataccagtttagagcgttccctatttagaaataaaataaccaaagtctcaggttgccaggcaactgcagcaatgataattcttagtattgctgctttagaaatactcatttttatacattttagtgatggttaggatgcagagaatgtgagttcagaatgtcgctgggacatcgaagtcccttttctatgagatttttagcattctcacttgcttttatttttcccccttagctctgtttgcttccttggctagcggtatcttcatatttagctatagaaatctcgagagattgttattattttcttaagagttgaggcagaagctgccactacattaattctgccaggctcattatagaaccacgccagtcactcagggagaaatgacaccgtctggggatcggccggggtcacaaacactgggttcaagctttggttgttctgccgctagtttgacacatgaactctacacctcgtccttttcattcttaagaggaccacattctggcccctctcagagcttcactgaattgggaacagaatatcaggccccagctctgtcatcatctcttggcggcaaagccacggctcatgtttttgtctgtccactgcagcagccgttgtggcgtaatggcacatgatggtctcggggctgggtagaaattggaaggcgtcttcctttcccttttggcctttcaagtgtatcttcctttatgtctaatgtctggggttactattaaagtctttctgaattctgaaccaatgatcagatagatacaagagaatgattgggaatgaaaagcctgctaatcctagcagagtaggaaagggtagacagccccttccccaaccccacggcctcagtggaggagagaatggtgtggcctgcaggggagggacaggcagacagcgccagctgtcacccaggctcacgttcaccagcctcagcagtcagaccttcttccttcctcccttggaggaagtgaatagaagggcagaaccgagagcgggaactctatcttgatcttgctaaaggggtagaagttcctaattcgtggacttgctggaccacagggaggaggagaaaatgatttctagtacttatttcctggcatttcagctacatggaaggtagttagcacggtgcataaatgagcccccggtgagagtatttcccatcgtgagcaccacagccgggcgttgttctcactgtgcctcacaagctctgctaaatgccttatggatatttcattctgacaacctgtgacataggtactgtaatcatactagtatcacagatggggaaactgagacacagaaaggttgagtatcttgtccaagttcacacagctaataggcaacagggcctcactgcctcccagtttatcaccccccaccgagtacagtttctggaatattgtgctcggtcaacatttgttgcaataacaagtggggtacaacagaggatcaaacataccagcaaagcttgcatatgtgtagttgattataagtaaaagcacagtctgggcacagtggttcacacctataatctcagcactttggaaggcctaggcaggaggatcacttgagcccaggagtttgagaccagtctgaacaacataaggagacctcgtctccacaaaaaaaaattaaaacactagctgggcatggtggctcatacctgtagtccaagctacttgggaggctgaggtggaaggatcgcttgaacccaggaggttgaggctgcagtaagctatgatcgtatcactgcactccagcctggacaacagagcaagaccctgcctctaagtgagtgaatgaatgaaggcacagacccgaggggcagggctgatggtagccaattcatacattcaggtcggtctcctggtctcacctgtttctgtgattgctaagccaggctgatggctagatacccatggcaatgaagaatgtaaaatacgaaaggtaaaaaagggaaataaatcttcctttcaggacccaagctacttatcagggctaaacaaaaaataccaagtaagaatgtaatgatgaggggtggggagggggcaaaaaataaaattaaaaagaatgtaacaagcaacgagacgctcctgactttgaacctgtgtgcagggctccgggtagattagaaggcatcctaacctcagtaaatggctgtcagtggggcctgacagtctgggtcccgtgttctgggcaccaccaatggagggtatcctctcagaaagcttcaccctatttcatgagcctttaataaaatatagctataatctttctcgtgaaagagcctgacagttcatggagccacttcccacgccgcactgatgggagaaactgcaggactccaccaggctttctctggctccaggacccccacgaaggcctcctgatttatctggggcagctcctgcataagaagggtgaccgtttcccacagtggagaaccagacactgggcacagcccacttgataagacagcttccatctcccgcccctcctgggtatgcaaaggcattcctgagtgaataggttcaggtcagagcaggagaggttatcacccaggctgtgccttgaagctttgctgagtacaagaaaggtaaggaagagataagcaagaggtgagaatgacggcagggctggcaagtgagatcacgagcttttcctcaaacatctggctaagaatagaagctttgggaaattccacaactggcagattaaggtgatcagcctctcagctggaatttgtgaagtttcttcagactgagctcccagagaagtatgtgtggtggaatcgctgtgctttctaaagagatggattgcaacctgcgccgttgagctagtgctgagctgaggcccggtgagatggattctagcacccctgccacggctaacctcacacactcagacgctctccctgagcttttcatttctccatcagcaaaatctcaatcattcttactcctcgtccacctcagaaacatattgtaggttccatggagacgatgtctgtggtagacaaagagacgtgcttcaaaggcagaaaggtcactgttttatcatctttcagaatcgtgtaacccacgtggttctgccaccatcctgtcttctgtgcattccttgactttgaaagtacgcatcttttcttttgaccaagtagataattaccgtctatcgaaatgaaccctcatgcatttattcaatgagagtttgtgtgcctaacacacagcatggctgcctgatacagatacttggtttaagagaattctacaggctctgcacgaaagtgaagtcatgatgtaaggaggcaaaggactctgccctcaaacagtccaatgggcctgagaatgagcctggggtgggggttcgatgctgctgcacccccagttgtatctgtgtatcccagtgactggggcgtgatttgaatatttaaagatactcctttttcatacggcctttaaatgcaagccgagtacttctgctgcacagccggagaggtggtatgtttttaatgctggagtaaaacttgtctgtgttggacttagtgagagaatggttttcgttcagagattgtcaaggccaactttgatataaatttcactttacattttacaccacacgtgattcataacatttaactctgtcatccatagaactcggtgctgttctgatcagcaaggtagattctggcccaaaagaactggtggaggaatttaaggaactggttctaagcctaattgaggtcaccaaacatacagagaaaataatctgagaaatgtatagcagaaatctaagttttccatttattcatttactcaaaaataccctacaataaataccaggaatataacagatgatctgcattcttgggcaacttacagtgtagcaggaatacagacactgagcaccgagtaactgataatatacgcacatcagcgctgaatcggcactaagggaagaaggggtcgggtggggctgaggaatggcacagagcggtgattctcaagctctctcctcctcgagtcccactcattctctactcacgctcatctgtgtcttccaaagtttgccacagtccgtcctctaaatgcctgagtcattcacacctgttctgtcattccctgctttgatatagagatgatccaacacaaatcatgacaaaccactaagccaaatgcaagactctgaatccacagctgagtgtgatctttaatgacgactaaccatcatatcacaagttgtgtcataaccagaaacaaaacagccagagaaggagggctttaggttggtctggggacagtacggagagcccaagacgcccttgggcacccacagggggctgtgattattcaaggatggcttgatttaggcacaattaggcattggacaggatggagcatacaaatgtgttggggattaattcattaaaaatctgtcttgagctttaatagagcttcagtcagagtgtccaaccataaattctcacctgtttcacaactggttcaggcccaattgagcattaacagatttttttttttgttcatgcaaatgaggttttgtgtgtaattcattcattcatttcatttatttcatgtctaattgaacaatttttgaatagttacatttgtggagtagttaagttgtatcaaattgtctaatgtacctagtaattttgtaactaaaacagagctgaatttcattttgatataacaaaaggagaaccacagaagtagaggtggtttgaggaatagtcggcttttaagagactttatgatactctgttctttagggcaatgaccacagttgctgtttctttttatcctcacttttctttcttttcactccctaccgatgagatcaatgaaaatttggggggcatttctagatttggcagcctcccatttataagcatacatttttttagttttgtgccctgacatgcccatttttctgagggtcaaatgtgtctgtctttaaaacaccgcgttggtgtctttcaaaccacttatcaagggttgtttctcccacgagaccttgtcacccctgagcctgaaatcgcgcgctgagaactaattgcagtagctgcatacacacagtgaacaaagttcactgctcccttcattaagggcacctgccatatccactgtttccttccgagaactcttttggtgaagacgggatttttgttttctttacattccacatagctgccagaaggcccctttaaaatgcaaatctgatgtctctcagtctttaaaaccttcagtggcttcctgttggctacaggatagttgaaacccttttgtggcctatggagctcttccgaatttgggccacacctacctttctgaccatagaaactacatagagatgactgaacaccccaccccacccccacagtcacatgctttgccgatgccgattcttctgcttccagcggctgttcattcactcactcattcattcattcaatcaatagttaccaagaacataccctactccagtactgtactggagctcctcctccatttgtgagattcttcttatgtctttgacatgttttgattgtaagatgtgttgcatatgcagatgtagaaacacacctactcagtctatagaatgacaaaaaatctgtgtgcccaccacccaggttaggaaatagaacattccactagctcaggtgcccttgtgtgatcgtctgccttccgtcaccctcctgcctgttccagcggtgaccacagtgctgaattttctggttttgatccccttgcttgtcttataggttttaccacctaagtatgtgtccccccaaaacatactgtttagttttgtctgctgttgaacgttacgtaaatgaaatcatactctattctatgcccttccgtaccttcttttgatcagtatttcatttttgagatccatcttgatgcgcacagctacaggttcttaatcttcattgctgtacgatttttccattgtagatggatattgcaaaatattcttctgtgggtggatttctaacaagtttttaaaaactgattgttgaagttaatcgaacctatttctgctctaatgagatgctcacttggttcctccattaatcatttaatatggtcaattacattgtgagttttcttttctttttgagacagggtgtcactccgtcacccagactggaacgcagtgacaccaacaaggctcgctgcactcccaggctcaagtgatcctcccacctcagcctcccatgtagctgggactacaggtgtgcaccaccatgcctggctaatagtttatattttttgtagagacggggttttaccatgttgcccaggctggctttgaaatcctgagctcaagcaatcctcctgccttggcctcccaaagtgctgggattacaggtgggagccactgtacccagccaatcagttttccattaataatactaaaaattcttggattccttcctacttattctttgaggcttatctcaaatatcatctcccctctcaagccttctctgatctcctttcccccctcctaattctttgctccaggaaagttgtttccatcttccaactcaatggcattaaaatggtattttaatgtaggcacttatattttaaatatttgtttacatatacctctcctatcatatgagctcatctagataatgatagagggcacatgcagtggctcacacttgtaatcccagcacttcaggaagccaaggcaggaggatcacttgggcccaagttcaagaccagcctgggcaacatagtgagactccatctgtacaaaaaaaaaatttaaaagtatagtagccatgcatagtggcgtgtgcctgtagtcccagctactcggcaggctgaggtgggaggattgcgtgagcctgggaggttgaggctgcagtcagctatgatcatgccactacaccccagcctgggcaacagagcaagaccctgtctcaaaaaaataataatgatggaatcttgttcttcagcttccttacgattttgcactaatctgaatgaaaccagcctgatctaaaccttgcatctttagtgacagatatgagtctgacacccaccttcaactttgtggtagcctgcccagcttcccagaggacacctttgtgcccgcaggcttcctgtggccatcggatccccaatctaaactaggataaagtatatgttttgtggtattgtcacctgtttaggatgagaagaggcactgaagctataaccctattttctgagccagataaaatagcaaacatatatttgctctaccgggttattttgacaaatttatcaagcatcttcaaaatatacagtactagtctaagcattagggctaatgcagagagcttttgcaccagtaggacagaggaaaaaatgtgcacaaattagagtacaaggcataaagcagttaaaagtcacattatcaagtacattcaaggaaagaggtaagcagttccagcaagtaggccgggcgcggtggctcacacctgtaatcccagcactttgagagcccaaggagggcggatcatttgaggtgaggagtttaagaccagactgaccaacatggcaaaacccaatatctactaaaaatacaagaaaaaaaaaaaaaagccaggcgtggtggaacatgcctgtaatctcagctactcaggagcctgaggcaggcgaatcgcttgaaccccgggaggtggaggttgcagtgagccgagatcacgccattgcactccagcctgggcaacagggcgagactccatctcagaaaaaaaaagttccagcaagtcagctgtgaatattttttctatggcaataataataaacacaagatgcaggtatagattcctatttatgactacaactctccacatgtctagaatttggtggaagcaaataggtcttagaatttaccccaaagcttgaattactgaaactgcctgttagtaatagtcatttatcacatggatttggcgctggtgtcgtgaggatctaagtacagggaagttctgggcatgttcatttgccatttattaatttctgttctttgctattttttgggggggcgggtaggggagacaaaggtcttgtcacccaggctagaatgcagtgatgtggtcatagctcactgcagccttgatctcccgggctcaacagcgatcctcccacctcagcatcctgagtagctgggactacaggtgtgcaccaccatgcctggttaatttttaaaaatttttttctagagccagggtctcactgtgttgcccaggctggtcttgaattcctgagctcaagtgatcctcccatcttggcctcccaaagtgctgggattacaggcatgagccaccgcacccagccctactttgccattctttatttctcatcttaaggtggctacttagcttggcagtttccccttcttgttctgtaagcacctacgttgctctctaagtactgctttgtctgtatcctcaagttctggtaatgacaggtattttcactatcattcactcaaaatattttccatttctcattgtaattatcattttttgagacggggtctcattctgtcactgaagctggagtgtagtggtgcgatcttggctcactgcagccttgacctgctgggctcaagcaatccacctgcctcaacctcctgtagctgggactacaggcgtgtgccaccatccctggcttttcttttttcttttttttttttttggagacagagtctcactctgttgtccgggctggagtgcagtggcatgatcttggctcactgcaacctctgtcttctgggttcaagtgattctcctgcctcagccccccgagtagccgggattatttgcgcctgccaccatgcccagctaatttttgtatttttagtagagatggggttttgcatgttgccaggctggtctcaaactcctggcctccagtgatccactccctgcctcagcctcccaaagtgctggaattacaggtgtgagccactgcgcctggcccattttaattattttgtgatccgtgggttatttagaaatgtatttactaatcgccacagttacttggaatttgttccttttgagccttttaagccttgcaaaggcaggtgcagcacagcctagggctgctttgatcccactgttagcgcagtaaccttctgaggacgctgaggaatgatttacatacactcacatatatatgtacacccattatatacaccatatatattatatacaatatacacacatacccaatatgtatatacacccaatgttatatatatatatacacacccccaatatatatatacacccaatgatatatatatacacacacacccaatatatatatacacccaatgttatatatagacacacacactcaatatatatatatacacccaatgttatacatatatacacacacaccaccaatatatatacacccagtgttatatatacacacaccctatatgtatacacccaatgatatatatacacatacacacacacaatatatatacacccaatgatatatatattacacacaccatatatatatatacaccctatgatatacatacacacatacccccatatatatacacccaatgatatacatacacacactcaatatatatatacacccaatgatgtatacatacacacaccccatatatatatatactcaatgacataaataatatgcacacccaatatatatacacccaatgatatatatattacacacaccctatgatatacatacacacatacccccatatatatacacccaatgatatacatacacacactcaatatatatatatacccaatgatatatacatacacacaccccatatatatatacccaatgacataatacacacacccaatatatatatacccaatgatatatataatatacacacactatatagatacacccaatgatatatctatacacacacacacccaatatatatacacccaatgatatatatactcacacacaccctatatatatttacacacctaatgatatatacacacacaccctatatatatatacacccagtgatatatacacacacaccatatatatatacacacacatacacccagtgatatatacatacacatacccgatatatatatatatatatatacaccccatgatacatatatacacacacccaatatatatatatgtacacccaatgatatatatacacacacccccaatatatatacacacccaatgatatatatatacacacaccctatatatatatacacccaatgatatatacacagacacccaatatatatacacacccagtgatatatacacacacacacatccaatacatacatatacccaatgatacatatatatacaatatatatataaacccaatgatacatatacacacacacccaatatgcatatatacccaatgatatatatacacacacacacacacatgcatgccctgggtataaacagatctcctcactctgtctgcttgaacacagacttccaatcccttcttggcttcaaggattattccaactctcctttctgtggccttgcttgtttttttgtacacatgtggattagagctcaaccagagggctccagagagctcttgcttgctctcaggtcacctctgtctttttttttttttctctcttattctctttcccctcttctatctctccaattcttgctttgtatctctctccattcttcccttctgctattttgtcctacaaattttagctgccctgatctccccaaagtctggacttttccttgttcagaaggatgtggctgcctggctctgcttgggtcccctgtcgtgtttgggggcctggaacctctctcctggcagtaagctggggcacttacaaggctcagctcatcttttccccttctctcagacatgactttcctctgctgcttgttacccagtatcagaaacccattttttttttcttatagtttgtttggttttctagttgcttaaggttggagggtaaatccagtttctatttttcaaacatggccagaagcagaaattttgtcatttgtgatcatttttttttgtttatttctttaaacagtttaattgtctctaacatgttaatcaactttttgttgtttatttgtgatctaggtttgaacatctcattcttgcatctgtggtttctgctggctctttctcatggtgccgtgtttctttgtttatttgtgtctgggggctactcattttcactggcattttatttgtgagaattctgcaagctctgggataaagatagtttactccagacagcatttgtgtttacttctaccaggtgccagttgaggatagtctaaactacattctcagcttgaaatatttttgaccacccagatatggagaactaagcgtgcaaacctgcatgtaattcagaccagggttcgcaattctcaggacagtttctttcccctctgctcagtgcttatttcaagacagtcatgtcttgaatacctacaagggacaattattgggggttgattttcctgtgaaaattcacatgtggagcaggcctccagctttgactgctgccacataaaactcagcagggtgttacctggctgggcagatgtctttggggtgaaagaaagcttgcctgttctgcttatttatcttgagttcccaacttcacttgcttttttttggcctgaggattctttacctttttgcaggttcaacaatgcatttactaagacttaaaaataatatccacggccgggcatggtggctcacgcctgtaatcccagcattttaggaggccgaggcaggcagatcacctgaggtcgggagttcaagaccagcctgaccaacatggagaaaccctgtctcgagtaaaaatacaacattagccgggcatggtggcgggcgcctgtaatcccagcaactgaggcaggagaatcgcttgaacccgggaggtggaggttgcagtgagccgagatcacgccattgcactccagccttggcaacaagagtgaaactccatctcaaaaaaaaaaaaaatccacaacatttaactgtacttggtaagaaggttttcctaggaacccagcctatcatattgctcctttgcttttttttttctcctgttacacacctctccttcttttaaataagtaaggagatcatataacttattatcgaagccacttttgagagtgaaaagggacacttaattattattatttcatgttttgaaatattttctgacacagccgtctatattggtgaacctataaaacagttctattcaaaaattactttcaaacatgaaatgctttcttaataaaagaaaatacatcaaagtagaaaaaggttaaaactgctttatattgtttatctggacattaaaaaataagcagaataatcacttaatatacttttgtgtattttaatcattgtcttcactatcttctaataccacttcagtagtatttttcttaacactattttttctattgttaatgtcagggcgtttttctccttcacataatccaactgccttacctatatatttacatatatgtttatgtgcattaacacatcaaaccatctgtttttgataactgtggcttctgtttctcttgatagaatatcacagtttgtttaaaaataagtgtgaatttattcatacaaccaccaattacaagtttatttcagtgaaatacatttctcaattcagtgagaatattgtgtgttaaagtttcaaaggatcttcccacaagtcaatttccagagcatacttgtagaatttcacattttaatcttctatacagtttgagctcttgtcatctatatttcagggtcccctgtttgcaaattttgtttttaatcattgcaattcattacaggcttcagaggctgagctttttgtgtttcattggttgaacacttgattatggattacaacttattttgaaccacaagccatcaaaatttagatgacttgtttccaaaactggagtactttttttgtagagcatttggattgactcatgaagtatgttttaaagttaaaagctgcctaatgtcagcaatttcctatcatttcattatttcaagtgtcaaatatttctcaaatccaacttgacaggcagcaaagagagaaccgcacactctactgatgaaatgtttttaatccaatttaaacttcataaaaaatttttgtagttcagttactctcagtttatgtaaattttacacatttcaaaaactatagcttgtgcttctctgggtagaattagaactgtgtttgagctcagttatgaattacataggtacatcaattacaggtacatttcagcataataagtttctcagcttggaacattatatcttttttttattttttattttttttgagactgagtctttctccatcacccaggactgcaacctccgcttcccgagttcaagtgatcctcctgcctcagcctcccaagtagctgggactacaggcacgcaccaccatgcccagctaatttttgtatttttggtagagctggggtttcaccatgttgcccaggctggtctcaaactcctgacctccagtgatccacccgcggtcagcctcccaaagtcctggcattacaggcatgagccactgctcctggctggaacattatgtccttttttttttttttttttttgagacggagtctctctctgtcgcccaggctggagtgcagtggtgcaatctcagctcactgcacctctgcctcctgggtttaagcaattctcctccctcagcctcccaagtggctgggattacaggcaggtgccaccacacttggctaattttttttgtttttagtatagatggggtttcaccatattggccaggctggtcttgaactcctgacattatgtcttaaagtgctaactctgttcactgcacataacctcatatgttcctagatgagaccactgaaatagaaagtgaaagtctatccaattcttccatctcattttaataagtcttagtaataactacttgtattttgaataaagaaatgaaaaatccaggacaaaataaaccagacaggatgcagggtgataggcatacactgagacttctaggcaagtgagcaactggtcagccgaattaaagcccttggaggggttcctgtaccctaggttcttaatacatgcttgttgaatgaacaatcggaggtagcttatttgtttgaataaggctttctgtgtgttactgcaaaggaatgaggatgggacaggtttaggctttgtaacaagacctcccaaaggctaacacataggcggctgcttcctcggcaagcagagatgacgcttgtggccctttttgaaacaccttttttacatgccagaggtatttaacttgtccgtaccaaatggtacggacaagttaaaagggttatccgcccttttaactcaaatatcccgttgggatcaaacatttttgctctggagacctttgtacctgtgcagcatcagtataaggatagcctgggggtggtaacccagacacagctaacagcggggtctgagtggcttggccagagtcttggcctcaaattgagggcacagcagtggttctgactgttcctcttcggggaacgttgtacatcaggaggggcctgatggtaatgttggtgtaaaatgtctctgctgtgatccacccttgaagactgtgagctgtgcagaacgaagcaggtcatggcttgtcctctaggatgtgatgggaggctgaaagcatctctctgctgtgacgtaggagggaccgtgagccttatgctaggcactccttccagcccaaggcagcatcgtctactttggttttctttctttctttttttgaaacactctgcccaggctggagtgcagtggcacgatctcggctcactgcagccttaagctcctgggctcaagctatcctcctgactcagcctcccaagtagctgggacaacaggcgtgtgccaccatgcccggctacttttttaaatatttttaatagagatggggtttcgccatgtgtcccaggctggtctcaaactcctggattcagacaatctgcctgcctcggcctcccaaagtgctgggattacaggcgtgagccaccgtgcctggcctgctttggttttattctgactgtggctcctaggaagaaaaagaaaagatgatgctttggaagctgtagggttgggaagctggagacttcttgtgatggagaggtacacccagtagatacttatttaaatacttatagaaagacgactttatgccggacactgtgttaggtcctggctatacaggaagaagagaagtggcatctgcccatcctacgcagttctccaggaaggaggtggcaggagtgacatttgggccatccaggcaactcaccaagtcccttcgcagcactcctgaaaagctctgagatgttttgaagctaaaacagacaaacaaaagggaccaaagaggtggcatgagtagcatgagtcagatgtgattaattcctaattccttagctgcttctgtttgtttgttttgttttgtgtttttgagatggagtctcactctgtcacccaggctggagtgcagtgcagtggcgcaatctcagctcactgcaacttccacctcccaggttcaagcgattctcctgcctcagcctcccaggtaactgggattacaggcacacgccaccacgcttggctaatttttgtatttttagtagagacggggtttcaccatgttggtcaggctggtcttaaactcctgacctcaagtgatcagcctgcctcggcctcccaaagtgctgggtttacagatgtgagccaccaagcccggccccctatttccttatcttcttatccgcagcaggactttgagaaacggctcagttagggtcttgcagggataacagtgattagagcctgaacacaaactacatttatcccatgtcagaaatgaatagcttatcaaacgtaccaacttaaaagatgcaagaattgtgcaacaatagctaccttcttttcaaacaaaataaacatcactaaaaaactctaatcttaattctttttcaagaaatggataattcctccacatcattctcctttaaaattttgtagattctcccttaagttacttaatgtatgagttgtggcttctgtgtaacgtcttttctcaggcttgtattggtaatggaaagcattcttcagcttaatttccttttaattccttccaattactatgcactgttctttgtgccaagtgccagtccagttatccagttggtgcattttgtgagaactgtaggatcatggagatcatgtttcttttcttttcttttcttttctttttttgagacagcgtcttgctctgtcaccaggctggagtgcagtggcacaatcttggcttaccgcaacctctgcttcctgggttcaagtgattcttctgcctcagcctcccaagtagctgggattacaggcacgcaccaccatgcctggctaattttttgtagttttagtagagatggggtttcgccatgttggccaggctggtcgcgaactcccgacctcaggtgatccgcctgcctcagatcacccaaagtgctgggattacaggcatgagccactgtgcctggccaggatcatgtttctttaaaccacacatgatacccagaaggcatcataatagagttggcttcatcatcttccttatcctaggttatgcttgatttcaaaagaaatttgttcctcgacaatacacagaaaatgcacttaacaatagcccctgaagttttccccagccaatgactggttagcagtctaataaggatcatattggacaagtatctttaacacaaaacagcacagggaatcatgggccactctcatcgttaggctctcttcacaggtatagcctatgttagaaggcttctgaaccacagatgctaaagaaaaattagttaaactgaagactgatgaagtattccctacaaatgaaaaggcaatcttatatgacaaaggacactatcaggaggttgaaaaacaacctatagaatgggagaaaatatttgtaaatcatatgtctatgattaatatccagaatatataaagaactcctgtaagtcaacaaccatcaccacacccagttcacaaatgggcagaggaatcttatggacatttctccagcggagatatatgcacagccaaggagcacgtgaaaagatactcagcatcattagttgctagagaaatgcaaagcaaaccccaagaaggtaccacttcctagccagcaggatgtagctattaaaacaacaacagaaaatcagtgttggcaagggtgtggaggaattgcagtccgtgtgcgttgctggtgggaatgtaaaatggcatagtcattgtggaaaggagtgtggcagttcctccaagagtcgcatatagaattgtcacatggtccagcaattccattcctaggttacccaaaagaatggaaagcaggggagctggaggccattatgctaagtgaagtaactcaggaagggaaagccacattcctatgttctcaggtataagtgggagctaagctgagggtccacaaaggcagagtggaggaatggacattggagactccgaaggggaaaggagatggaggattaaaacgctacattttgggtacaacatatactacttcggtgacaggtgcaccacaatctcagacctcaccactatacagttcatccacgtaaccaaaaaccacttggacccctaaagctattaaataaaataaataaatataaacattcagtaacattatctttagaagaacactttttaataaacctgggcatgaagaaaaaaggctgaataatattccatcgtatgcgtgtgtatatccatatatatatatatatatatatatatatatatatatgcacacacacacacaatgtatatgtctagtgttaccaacttagtttcctttccttcaatattaaacgtctcatatttcccccagactttttgagagatagttgagaaataaagctgtgtaagtttagagtgtagtatgtgatgatttgatatatattgtgaaattattaacacaagttaggtgacacacctgtcacctgtcctagttatcatttttttttgtattgtagtgaaataaatgtctcatttaaaaaaaaaagaattgaaagcaggaaatgaaacagatacttgtataccaatgctcatagtagcattaagcataatagccaagaggtaggaacaacccaattgttcatccacaaatgaggagagaaaatgtggtatgtaaatataatggaatatacgtttcatggaaaagaatgtatctttcaatttttaatttttgtgggtacatagtaggtgaatatatctatgggatccatgagatgttgggatacagacatgcaatgtgaaataagcacgtcatggagaatggggtatccatcccctcaagcatttatcctttgagttacaaacaattcaattacactcttttaggtacttaaaaacgtacaattaagttgttatagtcaccctgttgtactttcaaatactagatcttattctttcaaaaattggttgaacctattaaccatccccacatcccccatactctcccaatacctttcccagcctctggtaaccatccttctactctctatgcccatgagttcaattgctttgatttttaggtctcacaaacaagtgagaacatgtgatgtttgtctttctgttcctggcttatttcacaaaatgatctccatttccatccatgatgttgcaaacaacaggatctcattcttttccatggctgaatagtactccattgtgtatatataccacattttctttatccattcacctgttgatggacatttaggttgcttccaaatctaatggaatatattattcactcataaaaagtgtgaaattctgatacatgctgttaatataacacggatgtaccttgcaagcatgttgagtaacataagccacaccccaaaggacaaatattgtatgattccacttatacaaggtacctggcacaggcaaattcatagagacacaaagtagaatggtggttaccgggggccgggggagtagggagtggggagttgttacttaatgggtagagtttgtttgtttgggaaggttctggagataaaggatgtgatggttgcacaacaatgtgaacgggcgcaatgccactaaactgtgcgcttagttgcaaggttacaataggacattttatgtatatttcaccacaataaaaataggaaaaggcaggtgatttctaaggacacaagtcccttggggttgctagttctgtcagacttttccccttgtttttctgaatgacaaggattagtagtggatgataatgagtggattcatggatttgagcaggacatgaaacaatttccatagacagagatgaaagggcatttctgacttgaaacctgggatgagcaccgatgcaggagaggcacgaaagctcacagcgtgttcagggcgtagtgaatagaggggtgcgtgccccgagcctgcagagcgggcagggatgtgtaggaaggcaccttcatcctcctcactcagcctcccagctccaggtccaaagccgccaaatcatctttcttgtcaccatcacatgataagggggagtccttccagactgccagtcaatgaagtaacacacacagccacggtcatgccagtctgagcccatcgggcgagccctgaggggaataacagtcttggtggcattgggcaagccccgaggactccatctcggggaataacagtcttggtggcatcggcgcttcaccaggcctcctggaaccatattcgggatccccaactgagtgctggaaagaccactggtcaggagcagggagcaggggtggaaggaggtggctcgtcctgaccttgacaatgagaatcctgttttaagcttcacgctgctgactaaacagaaaggccacggcacagggacagacgtgcgcatgaaatcacaggaagaaagacatttcacgaacaaatgcatcctcccaaaccagtctgaatccctccggacagggtgatgttaccacgcaactggcctggcctaatgagctggtttctgtcatccctcctggaaggttaccctgtaacacaaggcgtgcccactgacatgcagcctgatggagcaaggttacacctgtctgccttttgtgtgcacaagatcagaacacagtcaagtgaatacaaatgcaacagctgcttggggctcaaacttgcatagtctattttatttggatagagagcataaaattggctctaccaaagtctggaggctggaagtaatcataattgtaatctagtataattaccaagcctagacctttacctagtcctatttaacctccctttcacctttccaaggaatgtggagggataagagagtcactgaataagttggttggtaatactgtattgtatctctcaaatccattgtttttttttaaagaatgagatcaataaatataaattccaatattttcttccccaaagcaccatcttgtaccgctttggagaacattagagggactcacctgggtttccagagctggaaaacataagccccataatgcacccagtccccacggcgcgctgccatcttaggcccagtccccactgcacgctgtcatcttaggcccagtccccgctgggcgctgccatcttaggcccagtccccgctgcgcgctgccatcttaggcccagtccccgctgcgcgctgccatattaggcccagtccccgctgcgcgctgccatcttaggcccagtccccgctgcgcgctgccatcttgggcccagtccccgaggcccagtccccgctgggcgctgccatcttaggcccagtccccgctgggcgctgccatcttaggcccagtccccgctgcgcgctgccatcttaggcccagtccccgctgcgcgctgccatcttaggcccagtccccgctgcgcgctgccatcttaggcccagtccccgctgcgcgctgccatcttaggcccagtccccgctgcgcgctgccatcttagggttttgcttagggggcagatagaaaatagtaaatgaaaccctttcagatatttcctggccttatttagtaaacacgtctttttgaaagaactctgaatacacctgcagatttttcaaagcccagattctacacacttctaatgtcaaccttgaagggagatcgtagattgaattacagaaaggggtgctgtcaaaatgccacatcaaatataaacttcacatatgtttcttacctgaaacactcactcacactcatggaaaagcacaggaatgttctaaaaatgcaagtttatcacgaaggagacacaggaggttcagagacgatgaagcggcaagccgggaggaaagatctgagagaagccaccaggctggggcaggatttcattatatccagaattccacttgggctctgcagtttctttcttcctgagaattatttaaaagtccctggggaaggacaagagtaagaaaaaatcaagggagagcctctgggttactatgacaacatgactcttgaccccttctctctcacccagcagtgcctaagtcccttttgcattgctgcagagatctctggcactgtgattagcacatactcctaaacctgaggatgatttaaagtggaaggagatcaaagtttctaaatagtacaatgagctcatcttgactcaaaagatgtgtaatggttataatgcaacataactgagatgtttccttatcccccccaccagtaaagctggtcacagaccgttgcaaaggctctgtgaaaaatgacaggtctatggaaatgtctactgcaaagcactgataactcaggataatgattcaggccaaaaaaaaatttaaaaggaagtgaaacttcagacaatgtgaaacatgtcagagtcgtgtttgcattctaaattgcagtaatgatataaacatcattattcctaatctgatcctgcaggtggatcaaatacgcacacatctattaaagaacagtctgcatgctcagtaagtgcacagggtcttattaccgaatctttcagcacatcttcatttcatctttaacttcattagaatatgtaagttttggcagtctattgattcaggagaaatctatggatctattattttctatttgtctataaagtccactaattcaccttctaagttgttgttttgggttttcatcaaagtgatgacattccaactcctgattatgctacattgaataaaaataaatgtaggattttctcctttctgacctagagctaataagttgtacatattggctgagttactgcaaagaaagggcaaaatgaaaacacagctcttatagtcaaggttcttaggatcttattgagatgagctcctcagaatcagccaaacttcaaacatggagagcacggcccccagtctgccaagtcggcccaagactactgacacctactgcaagcaattagggtccaactacaaagttagcagaaagagcccacccaagaccactgtcacgtgtgacaactgcatgtttggagggttcccaaaacgaccctcaggctcgtaattctctagagggactcacagaattcacggaaaatactcatggctacaatttattatgttggaaaggagacagattaaaatcagccaaaggaagagacacatggggcagaatctaggacggtttcaaaagggacgcttccattgtcgtcaggacacattacattaccttcccggcatccgtgtgtgatggtacacgtggagcactgccaacccaggatgctcacctgagccttgtatccagagttgttactgtggtttcattacattggcatgattgattgattgatttcccatgtggtctaactcagtctccaggtggactggtactgtgtgaccccaaagcccctgccctaaatcacatggttgatccttctcttgcaaccagcttggaccatatgactatcaggtatggcccatcctaccctaagatcttatgtggccaaccctcaccataacaaaggcactcccagtgagtatgatgtagtttacctcccagaagctcatggaaaaggccacatctatctttgggaaaggtcaaattttttactacccaagcctgacctgagaagtgctaaattgtgagggtggaaaggggctagtgtgagcttggatgaacgaagtatctgaagagcaatggaaggaacatggaatgttcttaaacaacagaacatttttaggaccatagagtattggagttgaaagaatttgggagattattgcatttcttaataagagcactgccatgcagaagtggccttgtcttggtaacatgatagaagcacatgataactgtctttaaagtgtgaggggcccatgtgagcaacagggattatttttaccccatataatcctagagaacaaagccagtggccatgggttagaagttattaaaaagaagatttaagtttaatagaagaaagagctttctaataattgaggctattcagaatattacacaggctgtactgggatatggtaagttctcccaagttaaaaatattcaagcagaaagcagatcacctgttaccatggcagtgcttttattaggaaatgcaataatctcccaaattctttcaagtctaatactctgtggccctaaaaagagttttcaatcttgacagaattgtattctggaattagtggactatttctttcataagtcattatgtgaattaccttgaaaatttctaatatcgtacctgagtgccatggccttggcatgaatatacacttcctgagcagaacttaagaatgagaatatctggagtaattcaggttctgctaattctgcatggttgtcactgcgatgatgttcattgttctaggtaagaaggataaatgagtaataaaagtttcatgggacacatataagtgaactcatgttttatatccacttcagtcattcattgcaagcgagtcttgttcaatgagatcaaagcagattggttaggattttgacttgaaaccttctgttatttataaattggagttacatcatatatttcttctaaaagattctattgagactgtttgctgtctacagctggtctttctccagaagtaggttgaattgccatgaattttatcttattcagataaatagaatgctggtatctaggatccaatagattcatgtggcccaaatttcatccagacttcatcctcctctgtgtacagtggcaactattaaaatcataacagagacttgttggctccagcccatacttgcaatgtaaaacctccacttggtgcaaactctttccatccagtattttctgatgtccctgagggctctcatgaatgctcatcacacgtctcctcctggaaacaactgctgcttcaccaagaatcgcaggccccacggggaaccatcacttctctcctgcctgtcactgggcacagccaccaacattccagagccatcatggtgccagccccaaatgaccaggatggtgtcgggaagaacgcgtctctcccacgcattatcctgcctcagaggcatctcaaatgatgctgcttgcacctcagggttctacagtgtttcataaaaagagatcgatgagcaaataaatagattaacttcatgtactcttaatagttcaagacctctgccaaccagcggtctcaggataagcaagacatgacctcataataggaggtgtgctggttggatcacaaaggctggtccttcagccagagtgggtggttctctgcagggacctcttctaagctctccttgatgagacaactaatcatcgtgtacactgccgaatgacagtgtttgcagaacctctagcatgcatgctggcctcggctatctctgccaatactttattacacaagccagagtcaccttcatcggaagacttgagaacttggcttctctatcccacgaatgttatgcagtcatcttcccagcatcctgcaggacagacctgcttatgccatttgcagtacaaacaaagtactatctatctgaaattgagcagcaagtactttaacttcacgtacctctccttctgaaaatgccatcaggatagctcagcccataccaagcttctggtacttctctagtaccccaaagcaagtaattcatgccctaaggcattagcatccttgaagggaatgttgccaagacaaggccacttctgcagagcagataccttccccagaggggaggcgtccaaagtcttgcctcaaacgtaggaatgttcaggaagcagtcatggacagcgagatcatcaagtcccttaggaataagtaaactcaaataaaataaaaataaagtgattttcccttttggaggtatgtgtttcagtctggcgcaactcaacactgtcagaaataataaagacacttacttgagacctaggagaccctttggggcagaattgccctcagcagagctggtgatggtttcccttgagaacagcctttcccatgagggataaggaactgcggagatgctgctcaccttggccaggagcattgggccagggatgatggcttgggaccctggtccctggcatctcaggctggtctccaagggtcactggtgacctttcaggggacaaaagaaaaggatcttcacagatagttggctgtaaataggaaggaggcagggtcagtggtgaggaggatatttgaacagtcagcgtgtatttcaaagccgtggttctgtccccctctggtgttgcttccttctcctcttcactctgcagccgcctcttggtggtcagagggtgaatgcagggccctggggtttggggcctagggctgggagatcagagctcttggagctggcttgatacctggcaatcctcatccagcatctccatctctctacgacgcgttctggcacgttgcaggtgaagtgggtagagcgtgggatggttactggaatcgatgtagttccagggtgctgtccttaagagtgcgagtggtaccagtcagtgttctcggcatttaaatattagttgttgttatcttggctatctcatgcgtgtaagaattctgtgtgtgtagtttccatccttaaattcaaccaaggtattactgtaaaaaaaagcaagacaggcctggcacagtggctcacgcctgtaatcccagcactttgggaggccaaggagggaggatcacgaggtcaggagattgagaccatcgtggccaacatggtgaaatcccgtctctactaaaaaatacaaaaaattgctgggcgtggtggtgcatgcctgtagttccagctactcaggaggctgaggcaggggaatcgcttgaacccaggaggcggaggttgccgtgagctgagatcacactactgcactccagcccgggtgacagggcaagacttcgtctcaaaaaagaaaaaaaaaaaagcaagacaaaaactctctcccttttctagaaaagagcatgcctgtgcgtatggctggctgtgtgcctacagttcatgtgcctgtttccgtttttgctgctcaaagccatggattggtgtgtagtcaggacctgcattctctgcttggtggttcagtgtctgggatgatactgtttcccggttactctagagcagaggtcaacaaacttcttatgcaaaggagcaggtagcgagcatttttggctttgtgggcgacacaggctctgttacaaccactcaactcttattgtagcacaaaagtagccacagacactatgtaaacaaatagatgtggctgtgttttaataaaactttatttacaaaagcaggcagtgtgccagcttgggcctgcaggaccctggttggtcagccctgtgcctgagtgataacatgctctttcatgcctttaaaaatgattattaaagtgtgttcattatcctgttctttttgtcctttttcttgtttaataagtgttcactgattttaaaaagacatttttctaaaaatctgggggttttttgtgttttttttgtgtgtgtttttttttttttttttttttttttttttgacacaaggtcttgctctgtcacccaggctggagtgcagtggcgcaatctcggctcactgcaacctctgcctcctgggttcaggtgattctcctgcctcggcctcctgagaagctgggattataggcgcgcgccaccatgcccagataatttttgtatttttagtagagatggggtttcaccatgttggccaggctggtctcaaactcccgatctcaggtgatctgcccgcctcagcctctcaaagtgtggggattacaggcgtgagccacggtgcccagcataaatttattttcaaaggcaagtgtggtcagtgtaggcagggagtgaaacatgtatgcgtaaacacaactacttgaaagagcggtgcggtccttcctcaggcccccgtcagctctgctccatccccagtcccttcctgtgcctgcccaacctgtcctccatagccagggccccccaacccaaacccctccaggcaccacctccctccatccctcccgcctggctctggggagggggtggccagcggccctgcacgcttcttcctcttttctcttcctctctcttcagacttgatgcaaagagtgggctaagtctgtgctgactgttgccctggaaactcttttgaacctttctctttccctccaaagattccgagttcctcctacagtttgcagccttcagtaccctgccccttccctcccctgccctcccttacttggttgtctttattccaagttaaatgatcatcatgaggttgggaaagccgcagctttctatgcaccatgttttactccccaaaggacatcttttagagtccgcagaggcccacatgaagggctcaccagcagctctaccggtttgctttccacaaggagagctaaaatgccggttgctaagcagcatacatgccgctgcttctttccacaatgtagacttaaaaaaatcgccgtaaacattttaccatatgattgagtcaggtgtggggagtcgcagtaaacattttaccatgtgattgagtcatgggtggggagtcgcggaaatacacagggcaggcagttcgctatcacgatgttctctctcaattctgtctttggtctgtcttcctgggtaatgtcacatggagacccaggggatctgccgtcagctgtgtgcagtgggttaacaagacgacggggaacttcagagtgcaggcagtcctcatcttttgcagattctgtatttgcacattcacctactcactgaaatgcatttgtaaccccaaaatcaatacagcggtttcacagtcattctccgacacgggcagaggggtgaagatactgagtcgccagatgcacgcgttccccgccgaggtggagcgtgcaaagctctgccttcacgtttggctctcatatcgtgcacatgtgtcctttttgcagtctccttagcactgtgtttttcatatttttgtgctttctgatggttattttgctgtaaacggcccccaagaatggtgctgatgtcctatttagggtccctaagcacaggaaggctgtgatgtgccttatggagaaaatccatgtgttagacacacttctttcaggtaggagctacagtgctcatgggggtctagtgttaatgaatcaagaatacacacacccagaaaaaggaagaggaagcgcacagggcagccagcttgatgtcaccacgttacatccttttatccggtctttggtaagttttcttttcttttttttttttttgagacagagtctcgctctgtcgcccaggctgaagtgcagtggcgcgatcacggctcactgcaagctccaccccccgggttcacgccattctcctgcctcagcctcctgagtagctgggaatacaggtgcccgccaccacgcccagctaattttttgtatttttggtagagatggggtttcaccgtgttagccaggatgttcttgatctcctgacctcatgatccacccacctcggcctcccaaagtgctgggattacaggcatgagccaccgcgcccggccggtctttggtatgttttcttggggacttacacagggtcacgtggagatacagggggatgcgccttcggcccatctgtatgtggggccactctggaaagtgctaaggtaacagctatagtacatgaggaagccatggaagagatgaaaagtggctgaatgtgtggattcatcagatgatgagaacatttaatgtaatagatagcattggtgtgaggctagacaccaaagaaatgtacaatcatgttacccaagggaaggaaagtattaaacccttcttggctagtgttttattttaaagaaataccaaatataattcattattttgaagaaacgtattaaataaagcatcttattaacaaggttacgtattgaccagttgaagaaacttttgtcatcagaggttcacagaaacctaaaccatacgttaggttggtgcaaaagtaattgaaatgggccagatgcagtggctcacacctgtaatcccagcactttgggaggccgaggcgggcggatcgcctgaggtcaggagtttgagactagactggccaacatgggtgaaaccccgtctctactaaaaatacaaaaaattagctgggtgtggtggcgcgtgcctgtagtcccagctactccggaggctgaggcgggagaatcccctgaacctgggaggcggagattgcagtgagccgagatcgtgccgttgcactccagcctgggcaacagagcaagagtctgtcttaggaaaaaaagaaagaaaaaaaaagtcatcgaaatgacagaaaccgtaattacttttgcaccaaactgtatttcccctaagaacaatggcccagtatttacaaattcagtgttcacaaatattttatagaacacagctaccatgaataacaagagctgactgtatatgatcacaacctaactgagcagaactcaccctccactactcatgtaagacctgactgtatatgatcacaacctaactgagcagaactcaccctccactactcatgtaagacctgactgtatatgatcacaacctaactgagcagaactcaccctccactactcatgtaagacctgactgtatatgatcacaacctaactgagcagaactcaccctccactactcatgtaagacctgactgtatatgatcacaacctaactgagcagaactcaccctccactactcatgtaagacctgactgtatatgatcacaacctaactgagcagaactcaccctccactgcgcatattgaagacagagcccaagacgcatccaggtgcaacgtctctgctaagaatgtgtgccaggaatggggcctggcttcctcgtcgagtgcggctgtccgtgggtttctgctagacagataacgttctgaaggagttaaactttcacagctcctcctcctcctcctcctcctctatatcccttacctcgccacgttcatcactggtcattttgctggaagggaagccctggtatattcttacattgctctggaagtgagctttagcccagcgtcgccaaacttacaccttaattgatcccagatgagaaggaaaagctattgctcttaccccacagtcttccctccctgaggccagaagcaggtcacgtgtaaaatggtctgctctctgctgacagtggcctgagtctcccatagtgtctgctgagctggatagtccctctccagggagctttgcaggggatgggtgatgagacatggacatggggacgaattcctctcatctggaatcgcagacacagcatggagatatgagcacgcggcatgggaaataggcttcctcagcccttcaggatcagggaacgtgccagagatgcaatgacatttggcagcagttgagagtatgagtgctgttgatgaaataaacagaggcctttaaaagcaaggcaggaaaaatgctgggacgagtacaggaacagaaaaccagccatttctccaggtctattcaaagacgtagcaacactccctgcaaaccccagggcctcattatcaccactcagggcagtggccccgcacagcacctgcacagttgccagaggaggcctctctataggaagtgctgctttctgttgtggatagagtgactggctgggcctctctctgtgtttctcccctagtcttcaggaatatgaatgccttttccttcagtgctactaggtgcaaatatgcgagttaagggacaatgccaataaagtagccgcagtttcctggctaaaggaactgtgcaggtattaaaaacccaccgatctttaatccaggttcgtggcagggggactcctttttgttgcaagattgtctgtgtgtggaaaccctggagaaaggccacacgtgcagtcagcaagccgagtcaccaggcacagagccctttctcctgatcccctcctcttgtttctattcccaggcctcattatgtataatgtcacagacacacacgcccaggaacatcccatcacagccaggacagaagcgccaagggaggtgctttgcacagattccatcttggagttagaagcacttgctcggtgcttgccaactacaaatagccccatgctggaaaatgatgctaattagtatgccattaaaaagggtggggggaccaccacccacaacaaaatggccgtgtgcaggcctgaagccctgccctgagggccacagggaagcatggccgctaatgcagcctaattcactttgtttggcagagagagcaagctcgccatgttgctgcgggagtctctggggaacatgaactgccgtaccaccatgatcgcgcacatctcggccgcggtcgggagctacgcggagaccctgtccaccatccagattgcatcgagagtcttgaggatgaagaaaaagaagacgaaggtaaggagctcgcggggtgggggggtggtggatgagggagcctttggagccgtgccctggaacagagtcagaaaaagccaaatcaacgttgccaatcccccagcatcaggagatgtgacttggagctgacaacacgtggctcagggtccactttggggcagggaaaccttggggctgatacaaagtcatgtcacctccccacacctggtgctggccctggtcacccagcctggacccctgaccggaagcacttggtccgctttagagagtacaaatggattgctacctcaagaggaaaaacgttggagggatggaaaatattgtttttctcatgcatggcctcggtcctgcgtaggtggagactgtgtccttcgaaggcttggcaccaaagaggttctcaactccctgctctcagggcccctcccctgctgcatgtccaggagtcactccctggctgctgcttttgtcctggcaattcagtggtttctggatgatactgagtctgctggacatcgctgggctcattttctcaggcagaggccaagccaggatggtggcagggtggcaagtagttgagaaaaccatcatgatcgtggccactcagtggcaggggcagctgctgaggtgggggcctttttcccccttctctgttttgtaccttttttatctttaaatagcgtttcttaaccagagttccacggcacagggtgccaaacattggtgagccagcagcccttagctggtcaggcagggcctggatggtcaccccctttcctgagcagctgtttccccagcgtgccacacggggcttccccttcacaaatgcagtggtgatgtgacaccgggcgcgcgggcatggcaccccgagtggcccacgtgcgggaggccaacgggggtggctgtcagtagcctgtgtcgtcaggggccttcaccacttgccgcgcacagctgggctcccggggaaactgccacggaaaggccaccacattaactgccgtctcactcacagtacacatccagctcgtccggcggggagagctcctgcgaagaaggccgcatgcgcaggcccacccagctgagacccttccacaccagggccacggtggaccctgacttccccatcgctcacctgtccagcgaccccgactactcctccagcagcgagcagtcctgcgacaccgtcatctacatcgggcccaacggcacggccctctctgacaaggagctcaccgacaacgagggccccccagactttgtccctatcgtgccagccctgcagaagacccggggcgacagccggcccgcagaggcaggagaggctgcagccggcaagtcagaaagggactgcctgaagtgcaacacgtttgccgagctgcaggagaggctggactgcatcgacggcagcgaggagcccagcagctttcctttcgaagaactgcctgctcagtttgggccagagcaggcaagcagaggcccccggttaagccaagcagcgggggcaagcccactctctgagtctgataaggaagataatgggtccgaaggtcagctgaccaacagagaaggccctgaactcccagcctccaagatgcagaggagtcactcacctgtgcccgccgcggcacccgcccacagccccagcccggcctcacccaggagcgtcccgggcagcagtagccagcacagcgcctccccactcgtgcagagccccagcctccagagcagccgggagagcctcaactcctgcggcttcgtggaaggcaagcccaggcccatgggctccccccggctgggcatcgccagcctgtccaagacctcggagtacaagccacccagctctccttcccagagatgcaaagtctacacccagaagggggtcctgccgtctcccgccccactgcctccctcgagcaaggattccggcgtggcgtctagggagtccttgctgcagcccgaggtgcgtacgcccccggttggaatgagcccccaggttttgaaaaaatccatgtctgctgggagcgaagggttcccggaaactcctgtcgatgatgagcagcaggcagctactccttcagagtccaagaaggagatcctgagcaccacgatggtgacggtgcagcagccactggagctgaacggtgaggacgagctggtgttcacgctggtggaggagctgaccatcagcggggtcctggacagcggccgccccaccagcatcatcagcttcaacagcgactgctctgcacgggccctggcctcgggctcgcggcccgtcagcatcatcagcagcatcagcgaggacctggagtgctactccagcacggcccccgtctccgaggtcagcatcacacagttcttgcccctcccgaagatgagcctggatgagaaggcccaggacgcagggagcagacgctcttccatcagctcctggctgagcgagatgagcgcgggcagtgagggtgagcagtcgtgccacagtttcatagcccagacgtgttttgggcacggggaggcaatggcagaacctgtggcctcggagtttgtcagcagcctccagaacaccgctgtggtgtgcagagagaagcccaaggccagccccgacaacttgctcatcctgtctgagatgggagatgactctttcaacaaagcagcccccatcaaaggctgcaaaatatccacagtgagcaaggccatggtcaccatctccaacacggccaatctgagcagctgcgaggggtacatccccatgaagaccaatatcacagtttacccctgcattgccatgagcccccggaacatccaagagccggaggcccccaccgccacccccaaagcaggccccacattagcccagtcccgggagagtaaggaaaacagtgcaaagaaagagatgaaatttgaggacccgtggctgaaacgagaagaggaagtgaaaaaagagacggctcatcccaatgaagaagggatgatgaggtgtgagactgccacgggcccctcgaatgctgagaccagagcagagcaggagcaggacggaaagcccagtccgggagacaggctcagcagcagcagcggagaggtgtcggcctccccggtcactgacaacttcaggagggtcgtggatgggtgtgagatggccctgcccggtttggccacccagagccccgtgcatcccaacaaaagcgtcaagtccagcagccttcccagggcctttcagaaggccagccggcaggaggagccggacagcctctcctattactgcgctgctgagaccaacggggtgggtgcagcctcgggcaccccgccctccaaggctaccctggaggggaaggtggcttcccccaagcactgtgttctggctcggcccaaagggactccccctctgccccctgtccgaaagtccagcctggaccagaagaaccgggccagccctcagcacagtgccagcggcagcggcaccagcagccccctgaaccaaccagccgccttcccggcgggcctcccagacgagcctagcggcaagacgaaggacgccagcagcagcagcaagctcttcagtgccaagctggagcagctggccagcagaagcaactcgctgggcagggcgacagtcagccactacgaatgcctctccctggagcgggccgagagcctgtcctccgtgagctcccggctgcacgcgggcaaggacggcaccatgccccgcgcggggaggagcctgggccgcagcgccgggacctcgccccccagctccggggcctcgcccaaggccggccagtccaagatctccgccgtgagcagactcctcctggccagccccagagcgcgcggcccgtccgcctccaccaccaaaaccctcagcttctccaccaagtccctgccgcaggcggtgggccagggctccagctcgccccccggtgggaagcacacgccctggtccacgcagtccctcagcaggaacaggagctcgggcctggcctccaagcttcccctgcgggccgtcagcgggcgcatctcggagctgctgcagggtggcgcgggcgcccggggcttgcagctgcgggccgggcccgaggcggaggcgcgcgggggggccctggccgaggacgagcccgcggccgcgcacctgctcccgtcgccctacagcaagatcacgcccccgcggaggccccaccgctgcagcagcggccacggcagcgacaacagcagcgtgctgagcggggagctcccgccggccatggggaagacggccctgttctaccacagcggcggcagcagcggctacgagagcgtgatgcgggacagcgaggccaccggcagcgcgtcctcggcgcaggactccacgagcgagaacagcagctccgtgggcggcaggtgccggagcctcaagaccccgaagaaacgctccaatccaggtaggcggctgggcgcagggacgcgggtgaggagggcggcaggtgggcgagctgcccaaaccccactgccagggtgtcccgtgccctggggagggggcgtccaggcctggcctctccttgcaggtgggcgaactgcccaaaccccactgccagggtgtcccgtgccctggggagggggcgtccaggcctggcctctcctttcccacggcccggcaccccgcggggctccgccggggacatcaccgcggagggtttctctgtgagaaactgccctactgcgtgccgtcatcaggcttagggccgtgaatcccttggcgctcagcagggtggaaaggcgagggcccggatgcaggtggcagcatgacccgcacctgctcgctctgggggcagcctggctcttcgccgtccattccctcacccctgcccctctgttcaacaaccaaggatcctgtggacggtttacagcctgttgagggatcaggtgagggtacctaccctcatgacctggtggcttcagaagcccctcctgtgaggttggtggcctgcaagaccctggcagcctctctcagggatgtgggataacgcacagattgtcccattgaaagtggaatggcgaggcccttcctccacctccaccccaaacatatttgtggacagtcatgtttgcacacctgccacagggcctgcagtgccccccgccacacacaccatgatgcctgaaatgcgtgattttggagaaagtctttgccatttctttttttcctttttttgagacagtcttactctatcgcccaggctggagtgcaatggcgtgatcttgccaaactgcaacctctgcttcctatgttcaagtgattctcctgcttcagcctcctgagtagctgggattacaagcgtgcaccaccgtgcctggctaatttttctatctttggtagagacaaggttttaccatgttgaccaggctggtctcgaactcctgacctcaagtgatccgcccgtctcagcctcccaaagtgctgggattacaggcgtgagccaccacacccagtcagtctttgtcatttttaagaatctcctatcaaaaggcacgtactccagaataattaatatataaagcccacagacttgttaattggagtcttgggtggcacatgacagtaagttatgatgggcaaggagaagaggacccgggtcagagctggtggccctggaggtcttggggtaggagaaatgaaaggatggtaaggagagaaaaagacagacagaggcaaaagttcccaagaacaactgaagctacttgagaattttgcctggaatcatctctgctcataagtggcttccaaagaaattacccctgctcatcctttaagggcttaaaaaaaaataaatgaaatttacgcagaaccccacgtgcaattctgtggcttggttgaagccagggcggccgggttcctgccctcctggcctgtctctcccctcccgctgcccttctgtgcaacactaggctcttcacatgctctcagaagccaggtccctgcagggatccgtgcccgcagcatatgtggaagtaaaagatggggtgagacacagatgtagggcttcccctttcctactgctccagcaactgccccacaggcttgttctctgtcatggggtggcttcttcctgttctcccaccacaggcgagcacaaactctggaatgttccaaatgtaagggctgtggtcagtgaacattataaaccattcctcttcctagaatcaaagaaatccaccttaagggatggtgtagttatgcagatgtagttttatgatatagacagccccatccgctcccctcatcacagatcacagaacttggccatggggatgttaggctctaagcatggtagggaatcatcgtggctgtcagtaccttgacatctttatttgcctggggggggggtatgcttcagtctttgatacgctttgactctgctttacttcacccctcaatctcggtgacagcacttggagcagaaccccatttaagacaagttgaaaaggaagagccattccgtgtaacgtagcagcttctgtgtcttatggccagggccaagggcattgaaacgtattgatgagagtaaaaataacaagcaggaaagcatctgccggccttcccagtacctggttaatgaactcttgttattctaatccacgcagcctcggtcttcaaagtccagatgactgtgtggcatcggctgcgtggccacgtgtgtttcagtgtcccacagtgctttcatggactcaaatttagtgccttgcgtctaccagtccatttcattatttccgtggctttcacaggtttttgtttttttccccaagacttttattgtttggtttggcggttacagtggagtaaagaggaagaacaatgatggaaaaacaaacgtgtgaagtgactgcttggcgagcaggcagcaggctctgcatacgcccttgctctgggctaagtgctctcgtaaatgctgtcctctaggagcctctggttaggtaaggctattggaggaaaacagtgtaaaattaaaatgccagggcaggtgctagaaatggatttcatgtggaatgtcaagagcagaagacctttgtgatgagctgctgtagatccaggctccatgatggatgtggcagtggagatgtgctggtttcaggttaggtgaccttgtctggcttatttatgattattattaagagaaacggtggctgtcagacatggtcagcataaatcaaaagcaacttctttaagagaagctataaaactcctccaaggaaattcctaactagatggctagagtttacaattatgagaggtgtttggaaccagagaggagacatcttttgtctgagatggcttttgaatttggaatattttaatgcttatttccttagtaaaaatgaactagaattattgggaaaataaccttgacctctctgattccttggtagtacatgtaacagcagaaacgaccaaatatcaccgtggttccttcttgtcttctcattcttggaggtccatgttgctgaggagtgtgcagcattgggcttgttccaccggccatagcagggtgcagtgaattaagttagaaagcaggaggaggcttagaatcttgagctgtgtgacctttggggaataactgtcctctttgagcttcaattttctcatatgcaagtaaaacgagaagattgataggtaatagccatggtctctctgctgcccacatcatatgagactatgcagataatttaaataatgttatggtcatgtgatgtcttttccttagagcaatctgtagtcagtggggtttattttcagttgttcaacattgaccaggtatcttctgtgctcttagagcttggtgatagtttctggtgtgtgggtggaggtggaggcagccggcacaggggacaaggccactgtaagaagtttgtaatctaattggagagaaagggtgaaaagcgtggaatagagaacagtgaactgagtgcattcccagatgctgagtggggtagtgaaggcccaagtggagagagcatttagacaaagcaggatcctgcaaggcaaaggctgcagagaaatgtcgggattgagcttggtccgggagggtgcttacatcgggacaggcagagagggcgcagggcatcgaggctgaggcagggatgggactgcaaactcccagcggcaagagcctggcctgtgggcgacacagcgagattaactcaaggagggaccgtcccagcaagcagagcaagacgctagcaaacgcaagccacagtcacacccggaacaaacacaagccacagtcacacctggaacatctgggagctacaagaacagtacacattattctatattctacatagttctaaaagaatatcagtatattattgtagttggcaatggggagtcattacaggctcttgaccaacaacgtgataaggtgagagaaatgatgttgcttttattgatggattttcattgcttcatccacagctccttgccagcccctctatggtcagcaagatgaaattgtgtatagcccagagccaagaatgagcccaggagggaagggaatgtctgtcctggccagtgcacatatcagcagctgaggatgtcaatctgtgatacacagttgatgccataattacaccagctgagcccctaccctgagcccccagtcctcgcgctcccccgtcccctatcatccattatatgttatgtcaatcctattttcttcctccagtctcttaacatttcaccctcatcctggtgtgttacttccttggattctttcccttgctttccttttcttggactggatggggaagtctgacagttagatgagcaccttggtctgaattaaattcattcccaccacagggaggctcagcaccagaaaagccctggagtgagggagggtctgcctgaagagaagcccctcagggaagcatggaggttctggaatgctccagaccttggcccgcctggacatgagcaaggcctgttctgcgctcgacccagcctgcttggtgcccagcactgggctggtgcaggttactgttggatattattggttgattcattgatgggctggttgcttggttggcggcacagtcctgaaagtttactcatgtttattttctgtgtatttctcatatcttttcctgctggtgctaagtgctttaagtgttgagtctagtctgctactttgtcattctaagcgccagaccctgtgcctttctcttggtgctgagtcaacattactgactgatgggcctgtcttgtgagttgtgacttgcacctgtagtgaattgagctcccaggctaccaggttcagttcccagggcgctgcacaaaaacttgtgactaattgctcctcaccgagggcaccatggtttgctctgccaacctctcctattcgtttggttctcaggcacatcctggttttgttttaataaattcaagcagcacagtgatcactggcttaatgaaaaccagaggaaggcaagccgcttgctgtcagacttcagatttccagaatgtttctaagcgaaccaacctagagccagttgagaataggttcagaatgagagcctttttgaatacacagttgggggaaaaggaggagagtcattgattctctcagacaccaaggaagctccttagaatagaaccccaaagagagtaggtggcgctgatgctgtgagatgacactgtggtcctaggtgcggggttcggaatcgcagagaacacgggaggaagcccaggctcggcatcgaggagagctttgtggccctggagaacctgcctctttctcatccccagcacgggagcacttgccttttcagctaaaacatgacagcaggccacacagccagcatcgttcttcatcatggagctggccccttcctggtcaacaaaatcacatggattgattcacattctctttctctctctgctctgatatctacagttcctttcaacattagtgcctcgtgcttttttgactgtcttcctagtgcctactctttgaatcagaatgcagacagtgggcgatggagcgaaagccatgctggagggctctcaggagcaggagtttgggaatgggcagaagcatattccccagggggagctgagagggctcagcactcagaacacccatgtttcccaacacttaacctcagcagcagcatctgcagactcgtgtggggacttctgtctggactcagggatgttaagagtagaaggcccaatgtcagcttctcacgtgggctgtcagcaccgcagatgataccggaagatggactgtgatgggccagcgacccctctgactgcacgcagctgtcagccaggcctggaacaggaggggcgagggggtgggctcagcctctgttagtgggagaggtcctggttggaagtttcactgaagtatcagtgttgactttctcaggtcaaatctgggccatttcatgcggtaaatccatgtcggcaggtatcagcccaagtgttttgaacatgctgcacttgtacatgcctggaccaaatgccaggctgatgagcagggaggggttgaaaagcagaagggagcccaacccaccggcgtcagcaggaggctggccctggctgtggctccccgatcagacaggcggcgtccaatggggcaccacacgactcccgccagggtggggcttcccctgtacctttcttagagctgatggtcccctgaccccactcgcagcctggaaggaggggatccctggcagagaccgggcttggcagaaaactgggcatctgcttgagaggtggaaatgctggagcatgcagaaaatctaagaacccttatttatatggggccccagaccaggaccctcgggtcagtctttctttgcccagggatggcatagcagtaacatcgcttcctgtgccctttccagtaatgtgagggcaccatctccgcccctgaactcccttcaggccacttcactccatttcctcagcctgaccacattacccctgccccagtacttggcttccctcaccatcacctaagtgaagctcacatgcacctctggagggagacaggcgcggggagagggagcctcagctggaggtgcaggaactgagtatcaatccattcacgggattgaggttctggtacccaaattcagaattttacgaaaatccaagacacttgttcattcgtgtgcaggaaaaaggtattcctagcccccaaaccacacctaacctgacagtgggcactcacttcaccttgagagggatcgatgtggtgaggaagttcaaggttgctagatggcatggaaaggaggcaatgggaaggaagtagatacccgccaggatatttctgtgaagctgttgtagcccagtgaaatgtcactctccaggtgtttttaccttctctactcccagctcacacggtgccctggcacgggtattggcaggactctccaggtgtttttaccttctctactcccagctcacacggtgccctggcacgggtattggcaggactctccaggcgtttttaccttctctactcccagctcacacggtgccctggcacgggtattggcaggactctccaggtgtttttctctactcccatctcacacggtgccctggcacgggtattggcaggagatggagggtggctcttatccaagacattttcccatctgatcatatcccatccgcggtagccaggctccaagatggcccccatggtctctgcctcctggtgttcacacccttgtgtagtcccctcccgtatttaccagagttggtctctgttgagtgaggtaaggcagagtgatggtatgtcactttcaaaagtaggttataaaagacactgcaccttctgtgctgggtgcccctcttgctttcttgggtcattccctctgggggatgccagctgccatgtcataaatagtcctgtgtaggagaggcctgcatggcaatgaactaaagcctcctgccatgatgacatgagtgagcttagaaatggaagcttcaacctcagtcaagccttcagatgagtgcagccctagctgacagcttgcctgcgactccgagaggctctgagccagaaccacctggcaaaaattgctcccagattcccaacccacagggatatgtgagatcaatgtttgttgttttagccgctgggtttggggtttatttgttacacagcagccatttggaagctagagttgaggcacacagaagctaaacagtttgccaacaaacagtcagctagcttgatcagactgatttaaaagaaaaaaacccctctgatctggtcccttcccagggtaggtgtctcacgctaaggagacagacatttgctttattcccgtggtcgatgttacttagtttcgttagttggggcctgcactttgttggaaactaaatgcgattgtgtatgtgtctacacaagatcaaatctgggctctaaaaagtgaggttttggccgggcacagtggctcatgcctgtaatcccaacactttgggaggctgaggcaagtggatcatttgagatcaggcgttcgagaccagtctggccaacatcgtgaaaccctgtctctactaaaaatacaaaaaattagccgtgcgtggtagcgggcgcctgtagtcccagctacttgggaggctggggcaggagaattgattgaacccagcaggcagaggctgcagtgacctgagatcacaccactgcactccagcctgggcgacagagtgagactccctctcaaaaacagtgaggtttaatatgaagcaaaaggagctcggagcccagagttcactccatagagaaaattaacacagcagtgagtgccccttgttgtctcctggaggaggcatgcttcagctggcatctgctcatcaaaacgtcagtcccctgtaccatgcaagagtttagtctccattctgggagccatgtgcttcactaatacccagggtctcttctgctgtgaaagaaagaggatagatactgggagagaactagccgtcctcgtcacaacgtgtgaagtgtgtgaaatagtaccaggcacgtaaccagtgcatgtgagtgctactgctgctgttataagcaaataaacagtgttttctggaactcctgtaatgacatcaaatgctaggaccttttgacctatccatgctgaggatgccccctaggctgcgtgttttacaggtggaaactaggaggcggttctaaagattcctcagggagtttgctgagctaaagcccaagtgttggtttaggggagtagaggtggaggtgggtggtgggaagtgggagtgtttagccctacctcagatcctggggtgcttgtcatgacctcctctgttacatccacaaaatatttaaaagattgaaattcaggcttcagctgaatttcagggtgtagtggctcacacttgtaatcccagcacttcgggagattaaggtgggaggatcacttgaggccaggagtttgagaccagcctgggcaatatagcaagatgtcgtctctcaaaaaaaaacatttaattagctgggtgtggtggtgtgcacctgttatcccaactacttaggaggctgagacaagagaattgcttgagcccaggaattcaaggctgcagtgagctatggatcgcaccactgcactccagcctgggcaacagagcaagaccctgtctcaaaaaaacaacaaaaaaattgaaattcagaaagactaactctctgggcttatccccctcctcaggttctcagagacggaggcttatcccagcactatccctggacacctcttcccctgtgagaaaaccccccaacagcacaggcgtccgctgggtggatggccccttgcggagcagcccgaggggccttggggaaccctttgagattaaagtctatgaaatcgatgacgtggagcgcctgcagcggcgacgagggggtgccagcaaggtgaggcagcctccttcccaccccctgcctacgtggtggcagctccccaccaagcctgagcaggtgctaggcagggccctggggaagaaaactcagacccgggcttcccagcgggcttctggcatgggtggtgggaagggggcttctgtcccagcaaagggcctttggacagaggccttggagagagccccatgtttctcttcctgaaatgttttaagggcttcaaagccaggggtcgggggctggtgatcttgggggcttttctggctccttgaggctcccagtcttaaccaacctttgtccaacttgaacacccaccacctgctttctcaacttaagaatggcctgtcatagtccaaaaatggtctgtcatagtccaagaatggtctgtcatagtcctaccttgtgaggtgtctgaattgaggtctgtcaagggagaatttggtggggatgacccatgtccctcccacacgtctccaagcccagcctgttttccatcaacgatactcacaggtgctcctgtggtgtgggctgggtgtgagcagaagggccctttctcctctctgtctgtgtgctaggaggccatgtgcttcaatgcaaagctgaagattctggaacaccgccagcagaggatcgccgaggtccgcgcgaagtacgagtggctgatgaaggagctggaggcgaccaaacagtatctgatgctggatcccaacaagtggctcagtgaatgtaaggccggggtgccttcccacccttgtgactagtgggttcacctgctcaaccgggctggcgtgtagcccagggtgacagtgacacaggctgtgtcctcgtcctcagtcacaggatgcccatcaaatggaggaagttgcaccgagcgagcagccctactcccctggggatgggcgggaggggccgggacagcagaggggtggtgaatattgctcttgcaagattatttctacgtgtctcagtccaaagcacctgaaaatgagatttttccccctgcgtgtggcagaagatcacccagacatgaaggctgtattacaaatctcctaggccacaaaatcacactgcatatctagcctgaaatagacaagaatttatagagcccttaaaaaggtagagtgtacagtcctcgaaaagccacgcagagaacccagaaagcaaggaaaacatttttgagtggaaaaaaaaaaaaaaagacagccacagtgttatttccatttaatagaaagcccaggatgaccataaccatctaataacaattcaggacaattttgctctctttgaaaggtggattcaattgtcttgtcttattagttcctgaccattccatttagcacaaaataaaacttcagtctggtcccagctattacacggatataggagctaatgctggaagactcagtctgtggggtgaaatacattcctgccattcaagttccctctgcctccccttcccatccagccctcagcctccggcaggcctcctttgtacagcccctcccctgcactgccccaaccctcttccagtcttccccagccagtgtggagggcctacaggtggaggctggaagcttaggtttatgttccaaagcagctggttgaaaagatattggtgtgaaatggtcctgggtgaaggtgcggaagaaagtggcaggacttgtcagcctcccagctgtgccttccacatgtaactgcagtctcgcagcagctgcctctccacagggataaggtgataacaacatttccctaagtactcattggattcttgggacagtctgtggagcattctataatataatattaagttgcagcatttgccgctgtggccacaggcatacagacctgctttggctgctggctttctcacatactagctgtgggacctcaggtaagacacttaactctgagccttgacttccttagctgtaaaatgggaaaaataatggtgactacaccatagggcagttgtgaggtataaatcagttcccgttggtcctcttggtgcttactacactgcttggcccaggatgagagctcaggatctggtagtaattattactattatcccaaagttcaacaacaggagacatttcctggccaggcacggtggctcacgcctgtaatcccagcaccttgggaggccaaggtgggcagatcacttgagcccaggagttcaagaccagccttgacaacatggtgtgaaaccctgtctgtctctaccaaaaatacaaaaattagccgggcgtggtggcgggcacctgtaatctcagctactcaggaggctgaggttgcagtgagccagagattgcgccagaccctgtctcaaaaataaaaataaaaaacaggaggcatttccttcgtgtctgcttgcatgatgcactgaggagttggatcttctgttagaaatttgagcaaagaaagacatgaactagtcctgcgagggcctttcatcgaaggcgctaatggggagggcagacaggggcgagggcgctggttactgtctgcgcgtgacatgcgcacggggcgctgtgcttatccctccccgctgcggatacccttttccttgtttcaggaatccctggccacttcaagatcccaggggcctcctttcagtcagtcagttctctctccttcatttttgctattttcattaacattttattttcaagaactgtttatgcccaaggcagacttgacttgaaaattatcttcatcttacaaagtcagtcatatttttcccaggatgggaacaagctgaaacatcaatacatatgtgtttagatgcttccaggaaacaattgcttccttctagtctttgtacatgtcaaaaatcactgtgtttttgatgctgagaaagaaaatgaacagaaagctacatgaaaggggaaatatatattgtttcttgaagatgaattgaaaacagtaatgaaaaaaaggatcaatgagctgcctgctgactattccctgtgggcatgaggcaggggactggcatggaaagatccatttttagttctattatttcttcattctgatgccacttttaaggttgtccagtaatgtagtctgatgtggtcatagaatgatgtctccttttgcttttttgttttggtttttaaatattaaactggtattcagggccttcggtctccttccagctctagtcctggttaactgtgtcagcctcagtgagtcacgtcactgtccagctctcagggacctcatctgcagaaagaagacactctgcagacagcggccactctaagccccagtgtttccatagcacggcatcgttttcaaatcaagttcgtgttcattattatctcattttattcttcacagcaactcaaggcaggcagggcaggcagcgtaggagttactattctcacatgcctttaaagacactgtcagcagaggtggaggtcccagagctcgtctcttcagagcttgtctcgtgcctggggttccagggccatcccaccaccttggactgctgtccacgcctctcctcctcgtactgggagcctgctggacccctggacctgggccaggcagcccatccctctgcccggccacctctggacaaagcaggggacttgatgccagaggggttgatcccagatacctgctcttcaggcctggaatgatacagactttttactctgtgcaggcctgaacatcaggaaaggcatctgggttataatccagaaacgtcctttcatataaggaagcagaggtataaatgtcactcaactgagacccccaaaagggagggactctccccacctcaacttgaattatttacttgattgattgatagtgaatagtgtggtagcgtctctcaaatcctgggatccatcctggatcctccatggctggaggtagggggagctagaatgtcaccttattggtcagtagaatctcagaaaaaaccttaaggatctaaatactggtaaagagtgttcctttcaacccaaaagaggccgagaatcaggcaggagggaactctgcagtggcctaaggcaagcgaactagacctttagaccaaggggtagatgtgggggtggcagctccaggctgagccgtcgggagttgcttctcaccctgtttgctctgcgtctccatcaggctcttcctctcttgcagttgacttggagcaggtttgggagctggattccctggagtacctggaggcactggagtgtgtgacggagcgcctggagagccgtgtcaacttctgcaaggcccatctcatgatgatcacctgcttcgacatcacctccaggcgccggtagatgagccagacccttgtcctagtggtcccccgctccccaggacttcagagatgttgcacgcccctaggccctctgtgctggggcatcaaagacaatgaatgaggatgaaggttggtggcaagtctggagcgggcgttgagcggaaggcgagttttcttttgttttctgtaggaaaggtgcaaacgtcaaacaccgtggaaggagaaaaggatgggaagcccgaggggtgtccaagccctgtgagactgaaaaagcactttgaggaaccttaaagaccttgtttgtacataagaactgctagcaaaagagacctcactcttctcttgctttcgtgagaaaggaggggcgtggatgtaggattgctgtggaaagcgaacacaaaacaacccagaatgactgattaagtgccttgcaaatctttattattatccaaacatttatgttcatactttcttgtgtacagatggtgctagtcaagatgaaaacaacaaaacaaacaagaaaaacattttggaaatgtattcacagctctttttctcttggtgttttatcctatttctgacttgctgtttctaagtaagttgtgtttgtagagctatttcttaatcagtattgcttatgaataaatattacctgtcttttatggttattctggtgaggccactcaaacagagagacttccctcggcacgagccagtgtgtgtgtttccaaagtaggtttggagcagcaggtgacctcgatgccacatcccaacaagcagcgtggtcaggtagacccagaaggttgattgtggggcaggtgctttagagaacaggtgaggagacggcacctgcagcacaggggaggaggagtcctttgcgacctgggccctccctgctcctgggaggtgggccgtatgttctgtagaccgtttgcccccctcaagtcctccacacatgtggttccttgacccacaaatccacagtttgcgtggccctcaaaattcatattcatttttattccaaaaagtcttgaacgaaagctggaaccaattcaccagagccatatttctttctttagtattttctagtgttgtgttgtagattgattaaagtgggtttttccccagctgagagaccttctcaggcttgttcagagacttcaactgtattggattagaagaaggattcttgagactgtacatcttgtctgttgtccagagtacaaggatttcagctctcctgtgtcccaaagcctctatgccaagaagggacaggcttgtcctctcagtctttgctcctgcccaaaggcagagagagcttcccctccataactcacacgaccctggataggcagaacatagctgaagactatggatgtccaggtcttggctcccaacaactcaggacctcaaattcagatgttcctccctataacaattcccttaggaattatgatacccattttagtgattgatagaaacctggggtacagagtggtcaagggatttccctgataaaagctgtggtgctgatgatagtgcagcccagaatctaagagtccctgcagccttcgcatcgaggatggtacttaggcgtgtgcagagcacgcttcccttttgccctcaaatgcagcatatcttcatgagcctatttatttccaagctaggctgtctttattaaccaacaactcagccccagccactccccaagcggggaaaaaaacactacgtttcttggtcagtgtacctctggacactgcagcccacacagctggctgaactcggtaaatgggaaccgaagtcttgtgagcttcacatgacctgatcctttgttatcagaacagggttcaggtggccctgttggctcatgtgctttggaagccagctccctgggtcacgagtctggctttgcactttccataagagtctgcttctatgcaaaggtgcaaacaggagacatgcccaaatctgctggctgaacaggctaaactacagtgagaggctgctctggcatggctcgttcttccttctgtgtatctcccaagtctgacaagtgtgttgccctgggaagcaggacctccctgagctccttaaccttgaccccattctgcaggacagtcgcatgctctgggctcgcctctggcctcaaagcacttgtgtaagtgggcttgcttaacagtaatatccttggaggcttctggacccaaagggaagccaatccttcgagtttgccattgggctgctggttgctggtttcaaacatatagttcatgaaaagtctttaattggagattttcaaaggtgaatattctgtttttgttggaaagaaactcatctgatgagtcatcgatgagtttggctttcgcccctgccacatcctcccctgaggttccttccatgctgcactgccttcctttagccagtgacagagcctggtgcccttcctggactgaaaccgatggaatccttccgaggggagtggcattcggcttgcctcctgcctaaatctgcttttatccatttgtagcaactttatgctgtaacaaaaggcggaaggaaaccaagagttctcttagcaagtcagactccttcccaagatggcaatcacagaacacctcgcaggatctcgcaggccacggtgaaggagaatgctttatgttgatgttgtccattctctctctcttctctttgcttttttttgacctaaataagctgcaaacatgttaatttaccaatattgataaaccacatgaagaaatcaggcattttacgttatgatgtgcttgttcctgtctctgcctataaattgactgtattgatgatgaaggaaggagttccggctgaccattctgaagcagtcccagtcacgggaggatgccttacccagtggccagacatgatagttccaggtctccccttggttttggtgatagagaacccaaggaggcaagggggaatatcaacgaacccatttctatttcattacccacaagcgaaaggactagaaaaaaatatttgaaattaacatttagatgcataggtctaactccttgtgtgaacctgtcctcctcaccccctgctccaaatatgtgaggtggaagcattagcagcggagcaaaactaagatctaagaacgggcggtggtgctattgtgtccctgggagtcactccacgtcgcattgcacggtggtgctgaggagcgagagtttgctttatcatgggctttcagttcccacctgcgagctgcaaactttgatcttgttgtccttgaattcccctctacatcacgaggaagctgtctctttcatctcttccggatttggaatcagaacactctgcccgttgtttattcgccagttgccattcttaacatgggggagcattaagatgcaaatgcagagatgtgtcctgtcttgacaaaggtgggaacccctgagctggagaaggggctcctctcatgagaagctggggtaaacagccaggcatcgcagcgtggggaattagacaggcaggaatctggcctggtttgtcataaattagccttcaacttgaagtctattatgttcttataaggcggtagtgacttcagtccagccgcatctaccatccagggtggaggttcaaaaagtcttatacgcacctacaagtctcacgcttgctgctcagactttctgataaaatctcagagttctgtttgtattgaccaaaaatgcagttgtgcccacttgggtgtgtatctcatgtccttgtaaaccagccaccttctttggatagaaggcaaggctgacaaatctgcagatttgttcaatgcaaacacagccgtctatatcattggccactgctgattatattgagtgtttttaggttttttaggtttcttattccaaaaaggattttagactgtaaaatgactaaagatgagttaatttccaaactaaaaaaggaaggagtcctgcctgtactcattgttctttcctgctggactagtaacccattcttggagcacacacagagtccctcgcttctaaagacaatacgtcttaaaccctgaaaacttgccagtgagaaagaggttgaaagtcctgtttgctattagttgaggctaagccgtctgctgccactgtccctggggcctccatgctgccgccggggtatgtggcccagctgtccccccatgaaggacactcttcaatgccaccacacgggagtctgggcagggaggaaaggcacacagcccacttttctctgcaccaaatgaaacaaagctgggtgttcagtgtcactgatgcaagtaaatgggtctcaaattttggtgggggcagtgtttctttggattctgatacctctttttccacctccagaaagtatctgtcaacattggtgggtaacagcttataaagtgcatcacttagtaatcttcctgacaaaatgacacattttaaaattacaacctgttcattatttccatcataatgcaagcgtaattctaatccgggagaagatactgtcatttaagctcatcttctcaaaaaaattttttctgaaaattcctggaaactaatttatccctccctaaacaaacacattctgcttttgggtggccctacccagaacctgcagcaatgtcataacactggacacagtgcggcttggggcagtatcaagccttcattgcatacaaaccttaatctctaagcatagttgttcccaaggtccacacgtgtggaggcgagtactgaaataccacactcacacatctattccatgcgtacctagaaattaccttcaacactaaaaaaggttccttctttcattccctatcctgctaacagcccacattgtaatatttgatttatgaagaagttctaatttatttgtgaactcaggatgttgctttacagcattgctcgtgttctctcatttacttattatgcatcacggttggaaatgctatccacgtgccgtgcatcgaggtggagatttgctggatctgtctgtggctatttttttccatgtttttctcactcaagcaaagtctgttagtggaaacatgggctgggggatggggagaggacagataaagcaagagaatagggattagggtccaatcctcaatgcacagggcttagttcaaaatctaagctgtttctgtagtaagcagccaaatgggaaagatcccttcgttttgaatttgatgagaatgggcttggaaatccacgcccaccggcttgcacggaagaggactcagcctcttcctaatggttcaacattcaattcctgaggaaagtgctgatagtattagttccctacatttccctaagactcccatccaacccctagtgctactgaagagggtttgggaaagcaattggagttccttagcttggatatatatagtacctgtttttttcctctggaaaaaccaaagtactttagtgagtcttacaatcttaaggcattttgtcccctcactgggtcccgagaggcagggaggggctaggccttgagctaggagcaaggacatgggccgccaggcctggttgttactagctgtgcaaccttgggcgagcctcttcgctttgctgggcctcaggttcccgagtggaagactgggggtcagaacagctgcccttctgggagagcatcaagagaaagtggtataagtgatgggaagtgctttgaagaaattaaaggtctgtctaggagctgggggtaatcatttacagatgaagaaactgaagtctagtcattgactggcccgagttcacagagtggttttatagcaaaacagggacttgagtccagcttattggattcttcccatcagatcatattgcaccaggtatgtgtagacatgaacacataccattcctctaaggtgtgtgtacatacacggatgtgtgtgtacaggaggtacctgacatggtgaaaggccataggacagaaaacctgagttctaattccagctttgccagtcgtcccgtccgtgatatattccataggacagaaaacctgagttctaattccagctttgccagtcatcctgtccgtgatatattccataggacagaaaacctgagttctaattccagctttgccagtcgtcccgtccgtgatatattacctaactcctccagaactcagttttctaacctataaaatgaagacattgtgctagatgatctttgtggttccttcaagctctggatctctaattccatgattagtaatgtatgtatgtgtatataaatatgcttatctgtagaaatgggcccatttgaaaagtggagacaaggtctgcccaggtgcatttattgtgccagaaacagtgaattcctaaataagttcataaaatcttgttttacaattcaatggtagtgcttaatgttactgtctgaaatccactgtttaaccagatggaagactggggccattcaaaacattattagttcacaagtgtttgctgttaaaatgcttcaataaaactcatttgttaaagtcagaaattcaactcttctgtacttgggcaggtcccagcagccccttggcaggctagttttgtgcatgggcctttgcaagctatataaacgttaggtgttggcttgattatgataaatatgagcaggctccctggagaacagtccagaaaaaaagagttatagttctcacaaactggtgacatgaatccattaagctgtgtggcattttccagtgtaaagacattgtttgctggctacgatctctgactttttgtggcatatgaggtgtaaaatgttgtcaaaaaagaatctggtgtttaaaaaaaaatcaaactatggtggcattaaatgttcacttttattcta

SEQ ID NO: 4 - DNA, 410076 bp, Mus musculus
  source 1..410076: mol_type = genomic DNA
agttagcgagctcggggaaggaggcaagttcccaccgccggctcggctcggcgagggctcgcccaccttccctgcagcctccctgcgtcctcgccgccgtcctcctccgtttcggccccgctagaggagaacgcgcgctggccgggtggaggaaaatgctagcgatctggatgtgaccgcgaagagaggacgcgtggctggaggaggcagagagatgagaagacccattatttgagaaccaccagccgttccaacctttcctgcaaattggtgctattacttctggggtccatttgctttcattcttcccaaccccccattaagaaatcttgacttgaggaccaacccctaccacgaggggggacgcgtctgggttggcagaccttttggatgtagccttgtgggaacatttagaccctttcctctggaagagccaccatgaattcggtagccggaaataaagagaggcttgcggtctccaccaggggcaagaaatacggggtaagttgtggcggtgtccacgaggagatgcgtttccagggactcatctgagtgggtgtcctctgcttcccgggagccggcggcggatgcagggtccccagctctcgggtgcaccggcgtccccacggccggcggggtcgtgcgtgcatggaggcgggtctgcagctcgcctggctacgggaatgtcttcagcccttggttcctccctttcctcacacccttaacttttgcagtatttcgggacttgcagacagagttaagccgagggggagcatttcccaggaattcctctgctcttccctcggatcgctgccctggagcggggagcccgtttgctttacctgcaggacctggggtgggggctgttccccgaatgagtaaacatccagaagtcacagtcacccaccctgcgatagggtgttctaggactgtgtacctaggcccttgctggggtgggtaccgggtttgaaagagtagggcgctggatttctgggtgttctcgcagaagctgcaggatatccacaccccgcaagctcttgtgctgaccccaggaggaatggagggggacctgcgtgcgggtcactctggcgagggtgggtgggacaggacttccttaaggattggtcacttgaaggatggagatagatggagggcaggtttgcatcagtgcgggcaggacggcgaccccccccccccaccagccctccgccgcacgggggactgatggctctacagggcctgacgccgcgcgtctctccggcaggtgaacgaaatgtgctcgcccaccaagccctcagcgccctgctctcctgagagctggtaccgcaaggcttacgaggagtcgcgcgccggcagccggcccaccccggagggagcaggctctgcgctgggctcatcgggcaccccgtccccgggctcgggcacctcgtccccgagctccttcaccggctctccgggacctgcatctccgggcattggtaccagctcgcccggctctctgggcggctcacccggcttcggcaccggctcccctggctcgggcagcggcggcggctcctcccccggctccgaccgcggcgtctggtgcgagaactgtaacgcccgcttggtggagctgaagaggcaggctctcaagctgctgctgccgggacccctcccgggaaaggtgagctactgcggggtgctctgcgggaagatgcgccccaccttaggatgctgcctcgaggcgcccgggtgtaaggcccctagctgagcacccggcttcgcggcgccaggggatgcccccagtgggttagccatacaggttctccctaccctgtctgcagcagcatgccaaagggggcactaacagccagctgctgcgagttccaggttccaatggcttatttgtggctctaccttccctgcatcacagaaacatattttccaaagccagcatttctctcttaacactccatgtgtctaagtgaggaagattaagaggtggcccgctgtaagagctgagctacatcctgacctgctcctgggcttatttaataagcacattggttcctccatagcaaccccgtctgcgtggtttgaccggcctggagcccccagagcggaacacaatgcagttgtatttgcacagttgggtccaagtactatcacatgataatatttactcatccacttcaaagagtttttatcagtggttcgagaaaaacatcaagaaaaccgcattactgggggggaggttgctgacactgctcaatgacattttctggtttatttttttgtgacttttgaaatgaaatattgtgattccgaatagcagggcttaggagtagccacatctgcttgcctcttctgcttatccatgcacacacatggatgttttgtataccaggcttcaattacacagacagccatagactgctgtaaaatttaaaacgggaaaagtcgctcccgggagaattggttttataaatctagaacttaatctcgagaataattaactctgggttattgtcaatttggcatttttgtcgttccttcattaatcttccaggacaccgcaagagtaaatctcagggccaggatcctctctcagccttacactgtcttgatttaacacctttccccaaacacagacctagtttctttttttccattaatattacttgatttcccaccccgttcaaagtacagcccctgagacggcaggtcctcttggacgctatccttctctgaggagagcttatcttctgatgaatccacagtccatcatgtatcctcgtctgtgtcaagtgttgcaaagaagggactgtggaatggggtgagagaggcttgatggatacacatttgagagatcctgatgcttgagatgtgacagtggctgatatttgtaatcctaataagtcacaggccaccaaaattatcttagaacattgaagtcacatgctcataggggttcttcgtgttgttgtttgctcctctggtgcaagagtaaagaagcaccaactcgtatcttcaagaagggaaggggtgcgggaacacagacaggaagaaacaaaggttgaagcttagctgcatgcgcatgcctggtgatttatggggtcatgcgagagacgggggcctttgtttttgttaaagccacctggaaaattcatttcacactgcttagagggcagtgccataaatgttcagattttatttattggatgaaattaaagtgatgtgaaactgatcatattgtagagggggcaatggctccagatgcagccaagtcctggacaggccaagtctcagtgcttgctctatgatccaggggcattgagaggagagctgtgagtctggggacggtcactgatctatacacattagaacatcatacacagttgccagagttgcagggtttagccaggaacaaggatgctttgggctagctcattgatagcgagtgagctatggagccttaatatgaaccacctactgattgtctttgggaagggtaactttggggattgtgtaaatggtagtcgctgtcaccttctaattagatacaatttctataacatctttaatgtttgcagcattgtaatcaaacaaatgccacgttgtctggtgccctctgcgtggtgggtcctgtccaatggagacaaggcatttcttctcagtgctagctttatgagcaaactgtaagtgctgatttatgagcggaacctctgtagcctgcaggccctgaaagagttaagtttcagtagaataagggatgtcattgtgaccccaacgtgtaattcgctccggagaacaagagtctgggaagataaagacatgtttttgagggataattagcaaaagtcattttcataattcacttaagatgcttaaccatatttggggaatattttcacaaatagagtattaaatcgtattaggtagtatgaaaaaccttctgcatagtcattcagaagtcagaggcagaagagcaggccctgaaattcgttacttaagaatgggtttggcttttttttttccgaccgatttattttgcaatcttagtgagtcagtttcacattttaatacaatgtgtttttaaaaattaattctttagaatctcatcccgttcttaacgttcccatcaacacagcaatggaaaaccaatggttcagatggttggagtgtctgtcacaaggcgaggttcaaaaagtgcttcttttcttccgagagagagatgaaattgacatttatctagtagacaatatcccgggggtttaaggtttatagaatcaggatgttgtaatgcccacggtcacgttctaatctgatgagttcacttcttcatccctctgctgtcagatgatttccctcaacatgctctattgctggtagcaagctctagagagttgccctccatttattttggggacagctggatgaggtggggtgatgaagtgttagacagcctctggaggggcatctggatgtcccctcagattgaagactgcctttggtgttccaagagttgctctgagtctcagcatgcccgagagtgtatggcgtctggaagactgggctctgggcttccgggtagaccagttagttctatgacactggaggatagggcttcatgttaggccattatgagacttggatgtagctgggtaaccgggtaaaggatgataatgttgacagaagcaagaagagagaaagatggtgatagtagtaacttgagtttcctagagagggcatcaaaagaagaggcagattgagctataaacctgattgttgcaggttatctcaaaacccagaaagtgaaacctctgctctgaattcaccctctcaggagcaactgaactgggcaaggagctgtgccatcctggtgtcggccgtaaactcttctgattgacttttactgcctcagtaagaaagtgcttgccagtttataacctttcttttttagcgttggttaagtggaagtgctcagataaaacagaagagtggggctgtggaaaagtgctgggtctttaggtgagggttgtccttttcccactgtcatgtttcactgtgtaaatataaaacacttcctgcatcgtggtgagcacgcctttcccgtttttatagacagtcaaggcagggagccagaaagagcagccaaggaacgaacctctccgttttttgagctaacctagatcattctgatagctgtgacagaacctttgaattgactgtggaaagcccacggcacatcagcctgaggaaattccctggagaaagcaggaatgttccaggttgggcaaaggttatctgacatctgcccatttccatactcacaaaagaaaatctcttatgtaagagaaaggtccagaactacggtcctatctgactttttttctcctcagtcacatattctgactccatctatgccccagaaatatcagcaagattagccagatatcctgagaagggtgacccaggaataacagggatgaaagagaagaatgtctgccgggttaaaaacaccaaacgtgagctctaaatagccagagcccaaggaagtctagactttgggagatataaataaatatttctgtattttgccagttccaaaagaggcaggaatatgaaaaataaccccatttaaaagtaacctcctaaagccattgtagtattctgtatagataaactagactttacatttgaaatatttactaatatttctaacaaaggaattccagacaaatttcccttactctaagaacacttctttataaagcactttcagaatccttttcattttgaaagtatttaaaaaaacatttccttactgggggcagggggcagggggactggaagcatggctccgtgtttaagagtactgggtgctcttccagaggacaggggttcaatttccagctcacagctgtctataactccatttccggggggggtgctccagcactcttcggggctctggaggcacaagaggtgcacaggcatatgtgcaaactttcccctcattttcaaatgcatgtgcagtgggatgtgatcgtatttgcctcccgttagctctccactcttttcctctccccaacacagtcccatcccaaactcaacaccctcttttatttatttattttgacaaccactaagtccagtcagtgctgcccatatgtgcttggctgtggggccatccaccggagcatgggaaacctaccagcagccacattctcccttccctaccactacccactgccaacagctccctagtatgagggagagctttgaaatcatctacctcagttgatggcctgaattctgtcagtcttggccttgtataagtcctgggcaggtagtcacagctgctctgagttcatggttgtgatagccacggtatctccagaagactggatttcacagtgccccttcttgtcttccggctctttgaaataaaggaacagctgatgcctagcaacaatgatggagaagtcctggagcatttatcatttaagaccctcagagccatttccagagtttatcaaaacattcccagtggagccaggcagagcccaatctcttcctcaacatttcattttgctagacttttaagagccataccaacatggtcagttttgggagtgacttaattcatttgaaagattccccggctagtaatcacccccacccccattctagacaagattattacatgacaaatgtgatttttaaatgtctgaggctggtagtttgtcagggtttataatgattaaggcaattaaaatttaggtcagttgctctttggtgtcacagaccataccaatcatctgctgataacacgatggtgagagcaatgatggatgattgacagttattgactctgtgtgccgaacagtgtgccaagattgacagacagtttcatagccaaataaagacgcgtgtgatttctttgtcttggagttataggcgattattgtggttattatggtcagtcacacacatgtacatagcacacgcctatgcatgcatgtacacttacacacataacatcctgacccaagaaaaggagccaatagctggatactcagggtcacatgcatacattagccttccctgccactctgtccccagagattacccaagctggcgagtggtgtggggtctctcttcccttcagtattattttaccattgtcagctcataggcacccttcctttccttatagcctgttgagtggtcccattgggttgaggaactcctcgctgaatggccactctggtgaacttcctcacttctgggcatcagcgtgaaggaaccatcatcattacatccactggtaaaggtgccaaaggtgggatacatctgggatccttagttttgtttggaatgtttatcgaaacatcatcacatcagtgtgcatatatcatccttctggctgttgtctctgggccttctcaagaaacccctctgaagaaaaatggccattgaattatgagtagaaaggcatccatcagagggattctctttacttccttaattaacgttttattctttttgtttttgaaaaagtgttccatttggtcttgaactcactatgtagctaaggtctatcccgaccaaacacattgcaaaggttatttttattaattattttaatttttaataattaaatggtgtagtattggcacacaggaaacagaaaaatattcaatagaaaacaaaatataggagttgtcctaagtacaactgaaaatttggtctgtgattgtagtagtgttttcaaccagtggtggggaaatgggtgttttattaaaagatttggggaaaactgaacagatcaatattttagaaaacaagaaattgatctatatagttcattatatacccagaagatctcccattgggtcagagagctaaatactaagtattatagaacagtgggcttatgctgcattcccagcctttgcaggcaaatattcctcagacatttccactttgtttagtgccttatgttgtgtccatgtgtgggaaagggtgaggagggtcagaggtcaaggtcaatgttaggtgtctttttttagcctctttctgacttaggttttgaacctgggtctctcattccaaagctcatcagctctgctggactgacagtggaacttcctgcccctgtctttccaggcctggggttacaggcgtgtgcctgccttaccaggtttgaggttacaggcctgcgcctgccactgtgcctgggtgctttactcaaactcagcttcttatccttctagggcagggtttcactgactgaaccatctaaggaacaggtaccataacctaccaagttctttaataataataataataataatgacttaaaaatgtctgagtactttatctgcatgtacacctgcatgcctgaagagagcatgagatttcattataggtagttttgagccaccatgtggttgctgggaattgaactcaggacctctggaagagcagccagcagccttaaccactgagctgtctgtgcagccctaccaaggacttctaatgcaaaccaccatcactgttttcctggtcatgagctctccttgaattcctgctgtcaagctgactcagtcgtactgcattaaaaaaatgccactggattcaacttgataatacattatttattgttttgttctttgatagtcatataccaatgatcatttctgattctcattcatgtaccagtgtagtattatatcatattataaataaaatatgaaaaagtattaaaattcctgcctggagcaatacacagtttgctcttagagacagacaccatgagagtcacactgcagcatatcaagagggcaattgaattgctcaggaagtttagggggatgggtaggaaatgactttagaaagatgggtcggatagaaacacactgaagcggagatgttccaggtagagggaagggtgaagggggttacatacactggagaacttaagtgatatactgctctctctctctctctctctggtgtgtgtgtgtgtgtgtgtgtgtgtgtgtgtgtgtgtgtgtaatgggctggagaggtgttaagggagggaattgggagccttgtgggaaaaaagaatcaggattttctctgtagcaatgggcagacattggaaggtattcagaagggggttgaaatatcagttgtgtattgtgagacagggtgtcttgtgtaccagtgtcacagagtcccattagggcgtctcccacagtggtatggctgaattatggggactgaattgaagcgatagtgatatgaatgagatgttaggaaagacgtgatttctgcatatatgggtgctcatataaggcacgggaagtattcattctccgtgcatcagatagagaacacagatattaacacattaataacacagtagagtttgctactgggggtgggagtggttatgtgtaacagaacttgttggagttatctagagtttgaggttaaattgtccagtggggccagctggagtctctaggctccagctggtgtctctagggtgcaactgcattctctagggtccagctggggtctttagagtgggtttggatgtggagacatggatcttggagttgcaacaaggaaaaaggctatgaaatgaatgcacagatggtatgagctctgtgtatctgaggtgggcacattagtaaactgagcatgaatcataagcattggcctcgaaggaacaggaagcccaaagcattaggaagatagcccagtgtgagcacccgactcgccagcaaagcagacgccacaacaggatccttctgcaacacgtttattgggagagcattatactgcataggcaagaagacccgaagcccagaactggtgctgcttatataggcctaggagaggcatgtctcacacccggattggttatgcattctacctcatttgcatgttccttatctgattggttattctctctcagtacctcactgagcctcattatcatacctcatttgcatgtctctcatctgattggttattctctctcagtaccttgcagagcctcattatcatgcctgggccaggcagtgacttggtgaaaaactttactgcatatgtacacattggttgtttacccagacttatgcgtggtggccagtggtagccagcgccaccttgtaatggcgtatgtggcttcccacagcccaggttagaaaagagggagacaaaaagtaggggagagcatatggcatcatggtaaccaaacagtaagaattttcaggatgatggtaagccctgaactttgaaggaatcaagtaggcacagactcaagtgtccatggagttggctactaggaggttatgggaaatcttggcttgaacagtttctggcatcttggagaaaggtagagaatgtcagtgtgtccagtggtggatggagaactgagatatttgcagcatctcaactgcaaggttatgaggggtgccattcctgatggtcttttatgttattaaaatgcaacccaagatcagcagactctggtacaaaaccagccttatttagttgtgaccaggggcaggctacttgggttagggttagggttagggttagggttagggttagggttagggttagggttagggttagagttagcaaaggtcatgtgattgtaagataatgttgaaccaccatcttgtgttcttatactccaaagactttcccggaagacttgaatacagtgaaagccaatctccttgggccctccttccatcctcccctttggctattaatgaccctgacaccaacatggagacagagatacagctctggagaaaacggagtcattcaactctttccccattccttcatctccacatcaatgaatccccccccccccccacatttatccacctgtaggcatctctctccctgggaacagttcaggtgttcagctggcgaaggtggctactccttatagcccagttgccatgaatatggattgggagtctttgtcatagatggaaatccctcctgagagctcctgccccgctccgaggcccgcagggaggagtgcagcagtggcctttggcattctgggctgtggtgaatgaaggagaacagatttccttcaatgactgtgaatgatgcatgccaatctatccagcaccaggaattcaacttatctgctttccaatccggttttatctttctcagacagttttctttgcagttttactttgctgattctgtcgcattgattccagccagacccttctgaaggcggctggaaatagagacgacaccctcctccacttggccacatttcccacactggtagcagctgttagtcagagtggacaaagaaggcagggcgcttgtaaaccttaatataaagggaggacatgctctgaacgttgcagacagactgggaggctctgaactgagcaagcgactgctaggactgtatctgagggtgttgagagtgtcacggactaaattgcgactcttgttattttccttcttcattcctgattgctggtccgtactgttgccgaccatcaagatttggaaagctgttttagctccctacatagcaagcctctcagatctttgaagatcattacaaatatctgctcttcaaaatatagatttttttttaagcttaatgattcttttatttcctctgagtgatgcctgagatttgtaattgcttaatggaagactttcctttttttctaggctaacacagtagctgagggtgttgaggtgtgtgtatggtgtaattctattctttaatcagctgtgatgagcagctacacactcctaagaaacgctgccaatttatgtctaatggctgcctttgaggtatatcgttggccccctcccctgactccatggggtggggtggcttcgtgcagcaatgggagacctcttcggtacctgacaagaggccaaaatgaaaagggcagcggctgagagctgttgggctatttaactgaaaaggttattcagagaataaaccatgaaatttggggacccactaccaatcaccgctgttcaagaaaaataatctactggctcagttgtgtgtttggagcaggtgttgtaagtcccagaggttggtgcgattccagataggtgagtcacggaggtagtgtggtttccagcggagttagcaatgggatcttaggatagttggttgactctgtctctctgcctccctctctcccataccctctctctgcatctccttcctttgctttcttcctctttctcctcttcctcctcctttatctccttttcttccctcctttggtgttgggcatccaatccatgacctctgaacgttgggcagatttctcccatagactgagaacgggagtcagcagtattctcccccaagaccacgaatctctgcaaagctagagagagtctctcgctcgaatcccagaaggatatgcctggtacatcttagatggggttttggttaagccaagagcctgaagctacttagctggctgtcatgccatagagctctggtgagggtgccatagatggataaggtttgcctgcttctttctgtgctgggcatgggaccctgggcctcaaatatgctgagttcacactcttgggctgagcttgtcctcagacctgttgtgcatgttttttgtttttgtttttgttttgttgtattttagggtcttgctatgtagccctgactagtgaccttcctgccactgcttttggttacagaagtgtgcctttatacttgacacctcatttccccccgccccccgcccccatttgctgtctcctctgttgcttgtaaacagaataaacttagacaatcaggagtacagttgattttaagagatcaatttggtaaagagtattttagggaaagtacagcctaacggactgtgaaagggctgcttatcatttatattaagaatatctgtcctattgattaggatttagtaatgacgtgggggagcttttctctctcttggtagttgaggaatgaacatgaggactctaaacattgggatcatcattaaattaaaacctcttctgcccaggactcccccgtcttgattccccttctgtttgcatcttcaaatgtgtagacacatccccactgttaagccaatatttacatatttccaacctgcacatccggggcctggcattaaggctcctgtcacatttaatgctgcagtctggggaaaggacagtgaagctagttgcctgctgggtcatcagggtccatttagttgccttcaactctgtttttctttttttgtcagtagcccaggatgtctctttaaattacctacctcctggggactcttttgctaactcttatttcaaatacatcattctggcttttcatccagatacaactgagggggcctaatattaagagcaaagctgcatttggctttcgtgagcccaaagcatgctgggagcttgaagtagagttgatatcatcccagggcggcaggtgctgggcagatgcccctgtcactcctcatcgttccatggtgtactctgggtgcctataagtacagcacctgcagagcctcccagggacagactcttgctcagtgttctggcctgtgcataagtgactctcctcattcctttggccgattctgcctttagctgccggactctcagttatcctcctttgcccctaaatttattgatgcagttaggtctgaaattcccagggtgctttgtgacagactatatgtgtgtccatgtgtgtagtgtgtgtgcctatgtatacatatttggcatgtgcatatgcattttttatatatgtaagatttgtgtgtcatatgtgacacatgtatgtgacctatgtagtatatatgtgagaggtgtgtatgtgtgtgtgtgtctgtgatatacttggtatggatctgagataagtgtgtgtgtgtgtgaggtgtatgtgagttgtgtgtgattgggtggttgcagtgtatgtggtatgggtgtgggatgtgtgtgtgtaggggtgtatgtgtttgtggtatggatatgggatgtgtggatgcagtatatatgatgtggatatgagataatgtgtgtggtgtgtatagtatggatgtgagtatatgtgagctgtgtgtgtgtgtgcatgtggtatgtgtatgtgtgtgtgcctgtgttttcagagtgctaaatggatcacagaggttgatgactcagtggacatcctgtctcaggtttcagatatcgagagggtgaaggttttattggtggtcaaggcagctaataaagtgagctgtgcagttaagagtgcattcatccgaggatggctgtctcacaggctgagggaggaagccgggggcagctgcaggttagcctgtgacagctttatgagctgtatgtatgtatatatgtatgtatgtatgtatgtatgtatgtatctatgtatgcatgtatgcatgtatgtagccatggcagaaaactcaatacaaaggcctggttttaatatgcctgactgggccttctgcttcctgcatggggcatccatgggggaaggaaaccaagggttgtaggctttgtgtgggagttaatttatctttttatagggtgcttgtagtttccagtgattccagtcataccctgtatggtggttcaggaggaggtggtgggagtttaatggaggcttaggaagctcgcgctggccatgtagaggcccccgggcttccgagttccactgtagtttccacagaatttgtttcggctgatattttgcccactcatgtctcctgacctgcaccagtgcttgtcactagtccatcagtatctggcttttggattgttctgtgcatgcagtagatatccctttgtgcacacagtatatatgaattcctttttgaagttaaattctctaaaaattttgatgaaggaaagggtaaaaacacgacaaatgatttctatcctctgacaggtaatgaagtcgcttctgggtgaggggaagcggccagctggtgatctacagaggtggaggtggtgccctgggcagtagtgctggcctgttgacattgcctcttggtctctgaagagaaagctgcagtggcaggaggtgcccttctctgaggcagagccaggtgtctgagggctggctctctggggttcttgaggagttctttgtcctcatgttcttggttttgcttagtcatccactctcaacgtcattttgccccttggagaggaaagggatgcagggatgcctgaatgcttgcatgcccgctggaggcttgtagaaagcccatgggcctcctggatatcccaaagagcaaacttatcaacactggtcagaaacaggcagggcaaggatggttataccttcaggatgcacagtggaattcgtgagcctggtagctggatccattcatttccttcagttctcagagtgcctgaggggtaggcccttgcctcctcatggctgctctctgcttcacattctttctccctcttcttcagtgtcctttcccatagcagaaaatactggcttcctgcttagaatctctttaatgaggacctgtattccctctgtgagagtgtggtggtttgaataagaatggcccctgtaggctcatatacttgaatgctgtgtcatcagggagtggcaccggttgagaatgactaggaggtgtggccatgatggaggaagtgagccactggggggtgggccttgaggcttcaaaaggccaagccacgcccagagtgactttctcttcctgctgcctccagatcaagaagtagctcttagctactgctccagcatcatgtttgctgtgtactgccatgttccctatgtgttgacgatggactacacctctgaaactgtaatcaagagtccaatgaaatgctttctttcataacagttgccttggtcatggtgtcccttcacagcactagaacaacgactaagacagagagctttgccaccctcttgtcataatctctatgcttctgctgtcatctgagggatggggatgatttcgtttttaatgtgtaacttttggggaaacatgaacactcagcctactgcatccagcagaagtcacctgttgaggttcagaccccttaggccatctcggtgactctagcggcactgtctctgtcctctgcgatgtgataacacacgattgcaccctagatgctggtgaggagtctggaagagcaaggagatgtctcctgcattagaagcttcagactcccataggatctggagtgcagaggaggacagcatagctggctccgagtctctcagtgctgagcatgaagcaggtggggagagttgactcacatgcacttcgttggccgacgctgaatttcctaaggttcccacagattctcaagacatttctggtcccaggtcatgcttttcagcctcagttttgcaatgggaagctgtccctctctgctgcacaggcagatgcgccatccttatactcatgcttcaagaaagaaggggatgagctggggaaataggccagttttagagccgttgacttccatgcgtgaggccataggctcagtccccagcatcacacagattcatgtatagtagcaacagggcaacagttcaggtatagtagctgctctctgtaccccaaactccattcaccagagtctgttcctagcacccaccagattgggaagaactacacagcaccgtgtctttctcaccaacaccaagtctgacatacaacatttatactgtgaaggccaaagaaacacgggcctggtagattcgtggacagaaggacaattgctccacatgcattgaaagaagaaaaatggggttcacacgttggtatgtatttagtggatcatagacttctcaaacctttttttatcttttgtacacagggcagagtcactatgttatgtcaacttgaaccaacactttaggtgtcgggtgtcatataccatcgggcacttgctattttagccactgatgtttcataaccacagggcagtgggctcaggagctgccttagaggttgtggtagagtggaataggtgttgacggtgtagaggagctccttttgtagagagctgccacctacataaaatgaactttatgtctctgtggcatggcaacttggggcagaagtttggatgctgatgtttaatgaatgcctgctatgtgccagaaaaaatgtaataaggagcagctattaatgcctgtgacaaatgaggaaatggaggtgtggggcagtgaaggccttccctgagtgtataaagctggaaagactcagccacgacatcagtttcagaaagcatgcccttgaccagagaagagatgctcctgggaaccgcaactgtagaccatggaagttaacattccggtacatctgagcacgttaggacagatctctcactgctgccctgaggggtagccatttctctgttcctgctggacagatgaggaaactcagcaaagtcagatgccaagaccaagatgtggcaggagacaggacgtgcgctgggtggtccctgcacttctttctgtgtgttcctcacaccctccatccacaacttgctactcttccgacccccatcacagtccttggagaggggcagggggcatttcagatacggagccagggaggcacctgtagaagaatacaagatacaagagcactatgtcttaaaacaaatccgtttaccttctgggaagagcttgatagcttcttcctctgcatctgccctgggatagcctgggccaccagccacagtggcccctacaggactcagttccatgcaagtgttccgtgtgtgcctgtaacagtgtgacaagcttcacgcaggcagcccctatcactgagtaaacacaagcgctggcaaacaaatcagtgtgaaccaagcacattaaatggctccctgaataacagccactaatacattgctataattacattgcacatttcgctgtaaactccaaaaaatgatttattaaactcttgggtccttgacagcaatatgttcgatggcagagtaactttttcgaatttgccagcacattttgtgcgtatgacttttttggagtccgaccaaatgggccttttaaaagctctgattagttaatacaccttatatttacgtagctggttttcaggttaccccactgggaggtggccactcccccacttggttttgcccaacacccctctaagaattatcagggctggatagggagagttgtttggttgttttatttatttatttatttatttatttaggtactagatgaaagaaaaggaggtggggagccaagaaacatttcttccatctaacactattaacacagtgtcgtcacctagagccaccactattgagggctctagactctagagcaatgcattgaattagacctcaagactcctgcctgccctctggattgactcctgccctcctttctctactgaagagcccttctgaacttgtggggtttttattgggttatcgacacatgtgcctttcactggtgcctgacacttctcagttataatattagctatgttcatatggctgtgtgctgaataatgggcaaaaacagcttaaaggaggaaagacagattttggctcccagtttcagtccatcatcacatgagaaagacagggaagatttcctggaggtgagagcatacagaagagatttttcacaaggtgacagacagggatgggagagtaagccagaccagaatcaagaagataaccttcaaagtccactcctagtgacctgtttctatcggctcggttctgcctcctaaaggctccatcatagtacccttcatcatagtacccttcatcatagtacccttcatcatagtacccttcatcatagtaccacaagctagggactgagtgttcacatgagctcccgaggcgggtattcccaattcaaaccatagaaataggagctctgctgtcctgtgacacgtccaaggctctgcccacagatgaagcagcactgtcacgtggctgtccagtccccatgctttccttgcagattctccttcagactgttctcttagactctggctaatggggagtctccttgaggcatctttcccaactcctggctgagacttcccgccagggtataaagctagaacagcgagttgtgaccctgatgtgaaagccttcatattcctttacacctgcagcctccagccccctgtgcattccagcagagaaagaagttaaaggtgatatcacacagggaggcagcagccagaattagtcatgggaaaaatccaagggcagaacttcactttccagagatgctctcgtgaaatgcatatctgcgttgacgctgatgatgccatcaatattgtagccatgtgtccctaggatagggctaaactcagctttatacagacacacactttggatttacctttgtgtagcatatcgtaaagtgcagacccattcccctccagctttgggaaaagatgaaaaaaaaatctttctagcatatgtaagctccttcaaatgcgagtgcaagttagaaacgaggctcttagttaaaacttacctcctttctagatcttgaggttccgtgttcagtcttgcccattctgggggaccgcactgtgagcacggttacggtggattgttccggggagctggtggaatgaacacagagggccagaaccgggactgtggaagaacaagggggaggggagccagggttcctgcttctgcggattcagaaggcagctttccatacagcttgcctgtcaagggactaagatccctgagagccaagtctagattgcagtataaggcaactatatgctgtaactcagtaggaagtactttgctgggaatgcataaagccatgggttttatctcagcacaagaaaagaaggaaggaaggagggagggaaggaaggaaggagggagggaaggaaggaaggagggagggaaggaaggaaggagggagggaaggaaggagggagggaaggagggaggaaaggaaggagggagggaaggaggaagggagggaaggaaggagggaaggaaggagggagggaaggaaggagggagggaaggaaggagggaaggaaggagggagggaaggaaggagggagggaaggagggagggagggaaggaaggagggaaggaaggagggaaggaaggagggagggaaggaaggagggaaggagggagtacaaactacaaaaaaaattagacacaattttgaggggagatgtagagagtcacccatggcagccacagttaaaacaactgagaggccataacctgagttctgagctctcccttatttcattaacgtttattaaaaagctctttatgacagctctctctgtgctgagtcagaagacgggagccatagcttggtaggatggctttgtgtaactcttacatttctctctgagacattggaactcagggttcttccctcttccccgtgagatgctggtgttctttgtctggggaggactggcgtcagggtcctggagctcacacttgaacctggaagtagaaatcacagttgtggaagggaaccatagatgtctggaaaaacatggccttgtggtccaacctaggagttttgcctttctctatatcctggagtttagtgggcattgtgcccttggcagtgagcctggacttgaaaggttgggaagcacggaacgttccaagagctgtggggttgtaccttgtgtcttagatccctccaagccatcaggtaggtttgggagccctctccccccactgggcccttgagaataagggctttcaggacatgggagggctggcacctcctgtggtctggggcttcagtttctgaagaagagatgtggttgatagggtgggctggcaggagagaggtttctgaccttcaaggaattccttctgtgatttttacagttggtttccttctgaaggtaatctgccatgcagcacttaacatctggtactttactgagtgggacttaacatctggtactttactgagtgggacttaacatctggtactttactgagtgggacttaacatctggtactttactgagtgggacttaacatctggtactttactgagtgggacttgccgtcaggctctttacacccagaactcagggtggccgatccctctattttttttttaaagacaactatcttttttgacccctaattccttttcggataaaacttatctcttggtgaatgttgccaaagaatcttagaagtctctttagggaaatagattgcacaactctagacttcggcaggacacaggcttggtgggacagtttcatgtgacagttgcacagggtgcacactggtcaatggctcgaccaaagatgctcgtggcgcagagtgtggtggcttgaacagtgagtctgtgtgagcgagtatcaacacggccttcattcaccccactttacatgaaacaaaggtgggggcagcgccttttggttttgattttactggttcttggggtgtatgtttccttcttgcccctggtgagggatagtggagctggcagtttaggcctgtttctgattagcaaaatgacccttaaataagaccaggggaaaaaaatgccctcctgagcctctggggccctggtttttcccatagaagtttaatggccctaggttctgtgattttagctgagaaaatgaaagactcagaatggggggggggtgagggtgtgtgctggtttttgtttagaggtaggtggaggggttacagggaaccctggcccaggcctgaaggactggtttccctgagtgtgggatgttgtaaaagctgtagaacatgctggtggggaaccactctaggggaacagtacactggttacttctcacctgcttttttccaaaaaaaaaaaaaagaaggagtggtgttacacatgtatctttcagtgttcccagaggctgagacagggggattgttaagttcacgccttgcctgggctacatagcaagatcccgtctcaaaagagagaattagagagagggaaagaagacccaagtccttcattcatgatcaagctgggggaagtctccaacaattctagatccattctggaaatgccaggcaacccacagtggtcctgggtcagggatagaaggagaaacacagagtcccgagtgactggagcttcccttatggttttgtgaccgtgtcttcaaacttgggtgtcttaacactgagttgttcagccttcttcttggtctcgcccatgaacgggttcttggtttacacatttaggcatttgtctgctggtggtatttatgctaactctgcatgttgtttatgtgtgtgtagaccaaaggttatccattagtgttcctcaggtgtttgaaatgttctacctctcttgttgtactactatctactgtcctggaattcattagtctagactggagtgtcagtaagtctgggatcctcctgcctctgcacaggacccccttttccctcagagctgggattacgatcaccacagtcaacgtctttatttttaaatgagctttggggattgaactcaggtgccactcatgcaaagcaagcccttcactgactgagccatctctccagctcagctttcatccttttttaatgatactagcatacagctcttgtgacctgaccctttgtaggcctcctgtcatgtgacattaaacacggtcacattctgtgactgtatccaccatccatcttccccatgtaagactccactccccttaaacagtaatttccttggctcctcctgctcccagcagcactgaaacagtctatagattacgctgaagagaaagacctgagtgagctggctcatggaaccttctgactgtactccactgggtgagctcctaacacattgcatgttccacactgcagatatggaaccaaaggaaacacagactttggtttcaagagtggagagggcaacaggcatgcagatgaaagtccccatctgtgtgacaatgggctacagcacaagtgtgggcaggtaaaatgggggtgcctaaggtagcctcagaaagaccaacgtgaccttcaagggagtggcaggggataaataggtgtctgcctgatgcggtgtggggcatggagcctgacaactgcaagagacaaaggctgtgggccatgagcacctggatataacatgtgtggatcacggtgtctggggacagagacagagagcaggtggcattggggctttgggcctggcccaggacctggcctgcatgtaatgatgaatacatagcagggctcagagctgtcctcgaggccaccactgtcagctgcaagagacaaggggaagggtgatacggttgctggagggggaaggggctatggcaaccacagactgcacttggctcccttgggacttttgtcttcccatgagctattttgaggtctaaaccttgaaggcctgtgttctgaagtcagcacttcgtcactgtgataaaatgcctgagaatatcagcttcatggtggagagctgatttcagcctcaggtctcggaaactgcaggcgatggtttggctggccctgtgggctctagctttggggactgtggtgaggtggcacactgtggtgggagtgtgtggtggagtggcattactctcctcttggtggctataggagggggggaggggagggggagggagagagagagagagagagagagagagagtcccaagtgacctcatttcttcccactgacctgaagcttctaccacctcctaatagcaatgggctgaggatcagttcttcaacacactggccttcaggagccaagctatagctccagctgtgggagaaactcatatttctctctccttggattgaatattcagtgagatatccaaggctgctgacaggaacagctgggggagatgggcactgcagccattttctcaccggcaccctgccaactacctgttagagctctttcctcaacgctgcccgtgctccagccggcacctctgtaaaatgggggaagatatcgtccttcagggctcccgacaaggccgagcgaggcagtctctgctgcaagtctttagctggagttcgtgttcagtgtgtggtggctgtcattgaggtctttagttcctaaactgtgacctttgaggaacgtgatccagggcttgaagaggggatttgcaaccactttttaaactgctcacatctgttcctgcacttcgcaaagctgggttaatttttctgcctgcaagtaggtatgtgttcgtgggcctgtggtcaccatggaaatgacaagagaaaattctggaagaagccgaacctcaggaacagtcacacgcttgcctctggccagagtgggaccgcactgtgctcttattctataccgggggtcagtggggtatggagggctgcggactccatctttccccactccagcctttgaatgatcctgttggtctcagagaggcctgagagcttctgcgagaaatctctctgagccctcagccatttttctgcattaaaatttcttccctttatttctttcacatacaaatttaaatctcccttttcccctttaaatcacttttgtgctgtttaacctctttactctgatcccctgccccctcctgcctccttttgaagcagattttagctaatgggtcacctggatgagattgccctgccctcctcccaccccctctagcttctcaagagcaccagttagctttcaccccagaaggcggctgctcccgttgcttggcagcccctcccctgccctccaccccaccccatcccccacccccacccccaaccccccgcggagagaagggattgggccagactcttttcattcatctgaaaataggttatcgattagcagggctgccagtttactacaggggctcttgacagcctctctccatcacattatggtgcaaattttaaagattgtattacatttgctcaggagaattcaggagtgaaaaatgtagtcaagtgtggggaggggccataagaaaatggactgtttcttccactccattatttcctgggtaaaaagaaatgtgtcttcccccaagtagttctgaagtaatgtttgtgtctgtctgtccatctcccttaactgtgagcaagctagcaataccttgactgtgggtatgtttgcaacaacagagcccttctagtctgttttgtggatgccagagaaagaagggaccctgagggggctgaggaggaaatgttggccactatggactggccgaggttcactggtggggacagaggtgtgtgtaggcctgacactgggcaggtaggaattggaggtcactcttcttttcctggtggctttattgggattcaatcaaagtgttataaaatacaccttcttaagtgagtgattcagtatatttccgtagatttgtggtcgctgctgactctctctcattggtaagctactttgtgttgcttcagacctcactgttcttagtcgatggaagcatgcactgttggtctcctgggtctgattcccttcacttgccgcgctgtttgctgtttccaaggctcagcgtgttgtattttctatcaggatttcatttcttttatcagccagtcatatcatattttgttctctatctactcacctcttgttaggaaggatgctgccctgagcattctgcatgcaaatcttggcgaatccatgggtctttttaccatctggtgggtgggtgcctaccagtgggattgcaggctggcgtggtagttcatgttcaacgtttcgagagacttcccaactgtttgccggagtgtccacaccatttagcatctgctcggtccttacactcagccctttgacaccagtggatgggagggcctcgtagtgtggtggtttgttttttatttctcagatgacagtgaggctgagcatctttctgtatgctaagactattcttgctttctctggaaataaaataaaagtaagacttcaaagccctcgtccaatctaaaactgggttgttttattgttgctgcattgacagtgtcctctcaccgtccacgactcattgctttccagatgaagtttttaaagcaaagaagttttagttttgatagagtccagtgtatcaatttttctttgattactctgactttggcatcacatctaaatacatcattgtttgacatgaatgaggcaaaagaggccatgcaagctgccagctttaccctcttgaatcccagcattatctcattatgagtaaatccagaattaaagaaagaaagatatcatcatctaacccaagaccgggagaatttatctgtctaggagttttgtagtcttggcttcagcgtgtgtgtgtgtgtgtgtgtgtgtgtgtgtgtggggagagagagagagagagagagagagagagagagagagagagagagagagagagaagtgcatgtgttatgtgttgtgagtgtctgtggagaccagaagacaacttccagtgtcattcctatgtgtctgccttttctctccccttctctttctctcccttactgtcctgccttgaactttgccacgtcaattaagttgattgggcattgagcctcagggatcaccctatctccacacctgagatgtacaattctaagtgtaatctgccacggtcagctttgttttacgtgggttctgggaattgaactcagaccctcacattttcgaggcaagcactttactgactgagccatctcagccatttggcttcaaattttaggtccaagatccattctgaggtaagatcatccttttcccccttcttaaaaaaacaacaaaaacaaccaaccaaaccaaccaaaccaaccaaaccaaccaaaccaaccaaaccaaccaaccaaccaaccaaccaaccaaccaaccaactaaccaaccaagccaaatcaaaacaaaccaaacaaaaccaatccacaccacaccacaccaaagcaaaccaaacttgaacctaaacaacccaggctaactcagaattgaaggagacggagttggaatggccagtggacattttctgttctgttctgtagtttttgaaacagcatgcatagtggccatcatacaccatgttagggtgaggactgaaataactaacaggatgtgctgtgaatgggtaagggcctatataacctgcagtgggaggaatgtcatggagctggctctcggacaagaggacaggacactgacacacctcaggagaaaacttggcctttttaccagcatcagagacaaccgagcaaacaagccatcagagagacccggcgggttggcgaaattaagtcatgatgaccaaggcaggctgccaagcgagctgtcagggggcaggcagagagagggatcacagttttgctggtggctgtcatgtagtcatttgagaaagctcccgctctgctttaaagtccactctttctttctgcagactttatttcataccccagaccccatttcctgcgatgggtatagaactttcttaggtccatctttctgaggccctcaagaaataggcataatgcgtgggaggaggtgaggcatgaggctcaattttaccaaaactaacctaacttgtgtaagataaagtcactgggtggaatgacctcagaaagccacccccactctctcttgagacattgatcaccaaagcaaatcaggtggtagcatatcaagaggaacctaagtactttgtgcggtgagtttccatcttggtcccagaacattttgggtgcattgccagggatagctcagctctagagagaactgattgacagaagacagtgggtcttgggttgactttgggtagtggtcttgatgcttgtaccctgacatgcatggcaatatctctatacacaggtacacactgtgcctactggtctctctggagaagtggcttcatgttaactgccatctacctgactctaaagccttgagataaaagcaatttttcatctcttctccataaaaaggagtcaatgtattaataatctgagtttatgcagtaacctaaatgtagagggtctgttcttattacaaaattcaggttgagtatcccttttctaaaatgctgtaacaaagactgtcttagattttagattttgattttagactttgaaatatttgtaacatacacaaacacatgcacatatgaatgatatgaatggaagtggggtccatgttagctttccgttattgtcatacaataattgacacaaccaactttaaagagaaaaaagtttttttcagcttgcagcttccaagctcatgattgagaagtcatgtcaatttgggcccatgctggggcaggtactcacgagaagaccattcacctcatgcttgggataccaaagagagatagcaagagagcacacaatctctttggagggaacacttctggtggcttaaactctctccctaggtctcacttcttacattccattgcccctcagtagctccatgggctagggacccaacctttaccacacagaactttgggtgacggtccaggtctagattcaagcatcccactcatggttaccaaagactcatgttcaccccccagtgtgaccagtctacacccaagacttcccatggtctcagctattccagctcaaaagcccaaatctattctctctgagactcaaggcacagacagctgagttcctgtggaaacagacaatacaaacaataaaaagatgttcagctctaacacacaatgacgtttcccattcaaaaagagaggaacaagaaaatggcaaagtgggagtgtggtgagaccaaaggaagactaaaacctacccagtgaccattaagttccatggctctgttctcagcacccagtgttatgatgtgaagttttaagggcttgggccccacctctgtgaccctgcgagctgcaacctacataaccttgatcttgggcttgctctgctctctgatgtatctttcctgggtatctctcattctccatggtctccactgtggttcttctccattctcatactttgaaatcccagaggaagcctccataacctccactcttcatcccgaaaggcctgcatcacaatgaggatgtcaggatttgctgatggtacaaactgtataggattcagcttggaccatggctgtgagaatcgtagagggcctgggaagaggaacgtagcaaaggattttcagcaggctgccccagggactcttcctctcaatgcaaagcctttgaaatgaagtttgtaatcggtggactgttgttgttgccttagtgaaaagggctgactttttgtttttgttttgaaacaggttctcatgtagctcaggctggccccaaactccctatgtagcccatattgaatgataggctcaggtacttgaatctttggtcctcagttaggaaggatcaggggtgtggtcttgtggtgtgtcgctggacgagggctttgaggtttcaaaagcctacatcattctcagttagctttgcctctctctgctgcatgcttgtggatcagatgtaagctctcaggtacttctccgcaatacgcctgccttcctgcccctatggtccctgccaggatggccacagactcactgaaactgtgagcaagcccccaaacgaaatgccttcgtttataagatgtcctggtcatggtgtttctctacagcaataggacagtaagcaagacacactttgagatgagtccttcaggaattctttatccatatgagatgcaggaaaaccttttctctctggggtacagactgtgataaacactaggacctttcctagctactgtggctgctggtggcttcctcctcttctaagatggttggtggaggtttgctattgatgcagctcatagagatagactgctcagaccactcattccaatacctctctaggtttccagtctgccaaggcagaaccaggagatttcagtttggaatccaagatgttcaaacctatagtttttcagagctgaactttttattgcttccctgagattatgttaattgttcaactcaaaatttattcaacccatgctattaagactccgttgcttgtgtgggtggtagagatactgtctcagacatggttccaggtcctgagactatcaaataaggaaagagggtggacagaatccaaaaatgcacatattgttactaagtgaagctagcacctgacatggggctgtttaatcactctgaaggtttgtcttggtcaggcagcaagcaccgttctctctcttgtcccctccttgaagtggggttggaaatggtaggtgctgaagtaggaatccaggggaggatttaaaacaccagaagagagatatggctggagaagcaaggtgaggtgatgggaggtggagccagtgtagggacaagcaaaatgttccctctgcctctgcctctccctctcctctgcctttccttctgcctctctctttgcctccccctctccctcagcctctccctctcccacgcatctgcatatatgtctgtgtatcatatgagtgcagtcatcccagaggtcagaagaagatgccagatcccctggtgccagggttacagaaggttttgagttgtcatgtaggggctgggaactgagctcaggtcctttgcaagagcaacacatgcacttaaccccctgaactgtgtctccggcctaggaaagacatttcagacatttttgtgttttccaaatcagtgagatgtattgatgcaaattgtcaagctgggagacctgcgcatggctgccatcacaccaagggtgcagctctggggaaaatagcatggtgattgctcaaatggtggtctgtggaatcattgtttgatgtgaattccatgaaagtggagactggaacagacacttgagtaaccatggttacaggcttattcacagtgccaagggtctttctgcaggttgatggagagtgggttgcatgcttacatgcatgcttgcatgaaattattcctcagaaaagggaggaaattcaaatacattataacatagatgacatttttgcaaatgttagacattattcttttttaacttttatgtgtgaagtgtttttgtctacatgtgtgtctgtgtatcacatgtgtgcagtacccacagaggccagaagagggcatcagattccctggaactgtagcagactgtgatctatgatataagtgctgggaattgaacccaggtcttccaaaagagtggtcagtgctcttaaccactgagccatctctacagcccgatggtttggttcttatatatcctttctggaattttctcttattgttttttatttctcttattcttttgagactgtgtctcaagtagcctagaatggacttaaactcagaacttagccaaggataaccttgaatcctcatcatcctgtctctgcctctcaggtgctggcattagacgatgaaccaccacacccagccctttcaagactagtctacttgcaagccatcttctgagaagttagtttttaaaccccgtgtggtgtgacatgagcatcttatactgatgcatttacacattgtgtatattgtcttctagaagtgaggggaggactggagacatgactggtgcacattagctttcggcttctgtaatgaaatactcgtgacaatgagcttacaggaccaacttactttggctcacatttcttcatcactagttgacctggttgctttgggcctgcactaaagcagcacatcatgtcatgaatggtggcagagcagaactaccatggaccaggaagcaaagagggaaaggaagggggcttgggacctatgtattcttttgggaaatacccccagtgacctaaggatctgccactaggtcccatcccctgaagggtctacctgtgccaaaagcatcgtcctagagctaaggctttaatacacagacctctgggcagcatcagtatctgtcctgtgtagcaagggacctgcatctcctcagagcctccttccttctgaggaagagagggcttctgaagagatgtcctcaacccagagttttgaagcctagttaacttattattttgagaaagggtcttatgctaagattcaaggctcacattgaacttgcgaacctcctgcttctgccttctgagtgctggaatagtaggcatgagccaccattcccagctctactttattgacgatgacgatgacgaagatgaaaacaacaaaatcaacaacaactataactactagttctacctcctcttcctcctccttctctttcttagtttatttttgaaacaggatctctttttgtagtcctggctctcttggaactttgtatgtagatcaggctggcctcaaaactcacagagatctgcctgcctctctagttgacttcttaattcccctctgtccccagagcttacagtaaaatacagccatctgtttcaattgcttttgtactaaaacaacttaagctttagttttgaaatcatctttctaaattgtatagctcttgggatatatattatatatacatatatatatatatacatacaaacatatatgtatatataatatatattgtattatatatatccatatatatagcatatattaaaaactcataatgagcattgccatatgctgagcactttgtatgtatgacgttatttgatatagcaagccagtaatggaggtgctgttgttatgtccgttttagagataaagtggaacatggagaagaccaggaaggaggagcaaggacgctccttcacaacccacgtctattagttacttccttgttgtaatcaaacacttgatgagaagcaacttaaggagggagaaattactgtggctcctagctggctgtgtagccatcgtggtggcagtggcaggaggcaggcatttggtcaccatgcatccattgtcaggagaagcagagagagatgaatgttggtgcccagcttgctttcttcttctgatttagtctaggacttattgctgccctcatgtagggtaggactaatcatttcagttagtgtactcaggcattcctcataggcgcgcctggaggctcatctcccaggaggtctcagagcctgccagtattaaccatagcgctgaggaacccagctcgagtctctctcctactgaacctgttcaccatggtttgcttggaaagaaacaacacaagcacagactaaggaaaaatccggtgcatcaatacagatcagagattcaggactgagaccccgctgagtccactgatgatgcttcaaggagctaaactgtatggtgctaggaaataaaatctgtacttgaaattttctctttactttcaattcaagatccataattgattattcttgtttttttgttttgtttttttttgtttgtttgtttgttttgcgatagagccttgctctgtagccctagccttgaacttgctgctgtgaagctggcccccaattacaggaattccatcgctgcctcctgcgagctactgggatcctcctaaagccctgctctccccgtccagttgagtctgtatttagaggccagttcctcttcacattgataaacacatttttcagattttcccttgtttggaagtggcttgtgagtttcctttcatcttgtttgatgcaggagggtgatgggtagccctgggactatagcaatgcccaagacttagtactgggacacaaagggctgcttttcacactttagaatctgatatttagttttagaatctgatatttagaatctgataatagtgttaacaagatctgacagattcaaatggcaacattggctctggtttctggagagatggcaaaagaaagatgcctgggatcaagtattggtgtattatgaaggccttcaaagggcatttatagcagtttcctcattctgtgggttccctgtgtgtgtgtgtgtgtgtgtgtgtgtgtgtgtgtgtgtgtgtgtgtgtgtgtgtgtctgtataggcatgtagattttaagagttgtttgaccaaagttattatatggtacaaatatagtatataagactccggaggtgtttagtgtatggagattgtaaagggtcttattttgtaaaggcaactaacgacacaggaggccttagtaatggctgttgttttttatgggctctgctaggattttatgtaggaatcagtggtcctgtggtgactgaagtggttttctttagaaagcaaccagggcgtgcttagatggtttttcttgaaatggtacactaccctcctcctgttccaggcagatcatcttttgttgtatatggaaactatagcatgctttctaacactctagtctgctctgtaacatggtagcctgctctgaaacactgtagcctttgctgtaatactgtagcccactctggaatagtgtagtttgctttataacactgtagcctttgctgtaacactgtagcctactctgtgcccagccattgcttcttgctttgcactgaacactctccatgccttattcttctccatcattagtggtccctcttcctcccctggctacccacccttttaggtgtgattgttattcctgcaatggtggctctgtatacccacctagcctggtggccacatccctgccattctttcatcaaagtctatcttaatgttccttctatttaagaaaaacaacctagaggggctagggataaatctcagttgacagaatgcttgctgtgcacgcacttggttccagccctggcactatataattcaggtgtggtactgaatgccataatcccaggatttcagaggtaaagcctggaggattagaaattctagttcatattcagctacatagagagcttgaggccagcctggctatgtgagatttttgtctccaaaaatagctggccagaaggtagccctgcatgttttcccttaggctctgtcccctgtattttgagagagggtttcctggcctgaaactcaacagctaggccaggctccctgtttaggctcccactcccccgaccccaagcctgtctatgctttttctttttcatatctgcatatgtttaatatgtgtgcatgtatgtgtatatgtgcatttgtatgtgagtgcatgtatgtgaatggtgtgtgtgtggggggggttaggcctgacatactagaagtatctagtatgtcatactagaagtcttctttagacaatcttgtactttatactctgaggcagagccattcagtccaaccagagcttgctaatacatcaagcctcctgagatggctttactttgggaatcccttgtctcctctactttctgaggctagaattataggcaggctaccatggccccgggcatttacatgggttcttgtggatctgaactctggttctcttgcttgtgtggtaagtgttttaatcatagagtcatctcctagtcttctccctcctcctttaaaaatgtgtgttctggggattaaacacatgttcttgtgcttacatggtaactacttgaccaacatggctcttttcccagctccaaggagtcttttcatgagaattcattctcagtactcaatttagagatgtataaaggaagggaacagaactcagtggaagaagggctgacttagcagtcacagctctctgcgtctgagtcaaacactgaaaagagaaagaaaagtgtgtctctatgactgagtaattaatacactctcagagtaaacaggtgaggtcaaggccaaagggaaagtactgctggggaagtatatttatataagttaaagggatatatgggaatattttgacattttaatctccccaaagtaaatgcacagcatgggaggtgacaagtatacagggtaccagtgagcggatttctggtgacctcagagcacttagcacacccacgtagacttgaatttcacacatgacttgatatgtgtgcagttcccagcctacccccccccccccccgcaccttcctaactgcatggctttagtcaatccacagggcagaagaggccatggaatgaggctatggaggggtggggtgcggcttaggagttgagtgttttcctagcatgcacaagaccctgggggccatccccagtaccgagagagaacagaacaaagaaaacaaaatgaaacaaacaaacaaacaccctacagagttctggccctcattcctctttcctccctctattagctgtggcttccaggctactttgctcagtaccgaggctgtgatacagtggtgagcagagcagccccaatacctgacttctggtggaatcctgagactttagccagtgtgatctgcagccagggcccgagttcacatctgagttcagccactcactaagctgtgaggccttgcaaaaggtacctgtgtctcagagcctcagttttctccctataaaacaggaatgatcaaaatctttacctcagcggctattgtaggatttaaaataaatgattcatgcagggtgattaaaacaagcctgatattcacttagtaagtccacaataatattagtcatttataactagggtggggacagacattaaataaattataaataaacatgggaactgtcattaaacaaatcccagatcagcatgaagtcacacactgcagtgagttgtctaagggaagggtaaaggatgtggtgagtgggtaaaataggagcttctgatatagacagggagactgagtgggcagctggtggtgcaaagagacctcgccacagtccggggtggagatggggagtgtgtgagcccacctgaggctggagtcccaagaaggctagcagaacccaagggcgtttaagcatgtttggctcattttaaagatgaggtacagaaagatttcatggggtgatgaggttgttggtgaggctggtgaccaggcaatggcaggagctcatctgtgctgtttcagcagcagaaggaaatgttttacgcacaagcttcccttcacttctgtccccctctccccaccatgtcctctccttcctcccttctctcatttgtcctttcctggtaggttctcactatgtagtccaggctggcctccaactcataatcatcccacttttggcttctctagtaccgagattgcaggcatgcagattactgcctgcccatattttaatcttaaactcccgtcaattcgagtttcccttggatgccgtttatatgtcttttcactcaatgagtgaaggcagagtggcaagccgtcttcacgcggagagggcaaagcactagtgcacacgctgtgctcccaccacacgcatgcatatggtggttccctcctgcagggtgatgagaactcagaggcatttattaggtggtaggaagtgcagaataggggagaattcatgttcccttttgtttatagattaagataattggaaccatgtgttttttttttggtctatttgtctactcatgcatcatacgccagcatatccatccatttacctagccatcaacccatctgttaattcatctaatattcatccatctgtccatccatccatttgatttgtccatccatccatccatccatccatccatctgtccatccatccatccatccatccatccacccatctatccatccatccacacatttatccatccatctatccatccactatctacttaccctcttacccatccatccatctcccaattccatctatccatctatccccatccccacccatctactcatccacccatccattccacacattcacttaaacacttattcattcatgatttatgcaacgcaaaagtgtttcctaaggagcacaatgagccaggcattttcaccaggtcttcttcatgggcagccagtcaaataaacctagcccatgccctcatgcaggttgtggtctgttggtctgtcagtgataaatcaataggaatttatgtgtctgcacttgatatatgatgttaatgtgttatgggattagagaaaagcccacaaggaatgtgcggtgatgttgatcccagaagactgtttctttactagcttatttatttttaatttccaagatggggcctacaatattcccacatctcatttctctcctaaatctcattctcgcagatgctcacggaaggacagggaagctatggctgccgcacgttgcattcagtgaggagctgggttttagagaccgtgttttatttcctctttggtctcttgagtctggttgatcttgtctagagccctgataatctcctagacaaaatatttaaatcttctgcagctcgagcggctttgaggcaggaatattgtggctgaaatcctaaatattttggaatatcattaatgggagggttacacagcagatgtggttcgcaggctccatccccagagaatgttagaatctttgtgttgggaagtgtacgtgaatagtcatcagattctccagcctcctaattctgtaatttttttgtcctttgaggctgactcccactttcctccatctgcctctggttatcctcattttttttttttttggtctttgttttcagaaaaggataaaaaagtgtttgcactaaaggagggacagaggatggcattgttactaggactgttgctgttatgttttctgggcagggggcactgactgccttttcccagagactaaagcttcatgtctaagaagccattcttgtaactgttgaatttcagatgtaggctgattagggagtcaagggtttccccaaacgctctccatcataatgtatagaaacaggtataattgtagcttcatgatgagcttcagtgctgggtgtttttcagaagagctgaaggctcttgtgtgacctgccagttgttcctttttcttgttttgtgtaaaaggcaaaaggacttttttctgtcctgggcatcattagcgaccctgagagggagagtttgtttctttcattctgctgtgtgtgacagaagccggggactttctcctggccacacagctgggagctgaagctggtgtgagctctgcctcaaggctctagctctcccgtgtgggtgaggaaccattcagtgtcaacattgcctctcccctcttgcttctgaaccactgcaaggtaaacttgccaataggctgagttggttccattttgaatttagctaacagttattattgtgtggatctgtgtgtgcatgaagggtacacgtgagtgcacatgtgtgtcacacgtgtagaggtcagggaacaattttgtggagtcaacaattttgaaggagtctttcctttcacctttatctaggttgtggggttctcttattgttgttgttgtctttgttgtatacttaggtagacagcctccttcagcaagcacctttacctgctgagccatcttccattttgtgtgtgtgtgtgtacgtatgtgtgtgtacgtatgtgtgtgtgtatgtgtccttgtgtctgtgtgtgtctctgtgtctctgtgtgtgtatgtgtgtgtatctctgtgtgtgtatgtgtgtgtctgtgtgtctctgtgtgtgtgtgtgcgcatgctgagtgccttcctggggtactggtgatactcccagatccaggaagatgtggtgaggagtctaaagtctctgtatttccacattcaccacatttgcttcctgacctacagcctgcacaacttctgtgccctctgcagctctgcattcagaaaggctatcagccacctggataattgctcctttataactgcagacaaccggggagtggataacgacaataaatggcttgtaattctaggtcttagatctttgctgtaacataaagtctgctctccagttccttgtgttcacaacctggagaagtcaaagctaaccgttagagaagtcattgcccaccattcatgccctgccctcagatgggaacaagcttccctttttggggcctggaggtgggggtggggcaagggagacatttctaattttgccatgcttctgtaggaatttttttaaatgggggtatgttttcacccccagctattcctcaccacaggagtctgattgtatctgaggaggtggcccaagcttcagggtcttttatttcctgttggggttttaaagttacccttgtttagtttgattccattttataagtcagcctgaatgttggaaggcaggcggcctgttagtccatgttatggctttggggcataagaatcacagggcagctttctttgcaattgccaggcagacatatgtcctcaattatcccatttggaaggactaggctctttgtaccacccctcccccaaggtctcccgctgtcatgaccaggatcggaaagatctgggaatatgggggtaggaaagttaaaatgtatgtgccaggccctttataacactggcctctgtccttactcctgcttgggtatcctcagaatcaactaagctgtttctgggaaaagatcacaaaattcatctaccctggaggacacaggccaaagggttagtggagagaccatggacataagagatggacagacctaaggtcttttttctggtctagttgtttcaacttgggaaaggtcacttaattatcctgtccaaaatccatcctctctgtctgtaatcttggggatggtacctaggatttaatgcacacctggcaagtgctctactatttttatttatttatttcgggttttttttcccttatttatttttgagacagggtcttatgtagcccaggctggcctcaatagttatgaagcttacacctgcttacaccttacacctgctgcctgcacctcttaagtactggacttacaggcctggctttttattttattttgagacaaagtcccattaagttgctcaggctgcccttgaatttgtgatccttctgcctccgcctctggaaaacagctggcgatttgttaaattttctgactcccaatctctccatttggaaatgaagtgaagctgtaaggaaactgattttggctccataagagactggacatatggacagtttttgtataggggcttccctgagtgacttctgagtctcaggcatttaataacgatacctatttccccccttgcctctttctgtgtggattttcacccagacaccttgccagtcatgtttcaagacgaacagcgtggctcttctttcagcctgggctcccaaccctgtagattttaccttggcagatagattactgcatctagaggttgcacgtaggtaatactatatggatctctggagttaccacggagtcagcatttgtccctgcttaactttatattgagccaagaagcgaatcatttcattctctcatcatggggttttatggtattgctctggctggccctgggcttccaggtgtaaggcattcttttatctcagcttccatgtggttcattttggtttatggtttcacccaaacttgcctgacctcgttggttttggtcttttgtgaggtagcgccaaccagagtgtgggaagagagacccgatcaccttctggaattcaggaaacaaaggaagacaagagagagagagtgcctcactcaagctagtttcctcctgaagatttccccatttctctataggctggggacaaacctctggagcttcggggcagtctgggtccaaactatgagcattcctctcccagctcagagaggcacatctccattgcatggagcaaattgcatctcagctgacaactttcctctaagtttaaactggttcagaagttctggaaagtccttgttcaaattctcctctgaagctgtaaggcagattcaaatatgagccctgggagaaaagtcaaaagagcaaatccatgcttctaaaatacagaagcaggggacacacatgctgcttgaagcccctctaccactggtctgaagctatagtgaaatacacctatgttttaaggttctggaaaaatccctttatagctccatgtgagtctcaaaacaaataggtctcttaaaggactcagggtttagccccccccccccaaccaccacaaactgcatcctttgtgccatttcttaactgctcatttacgagccctgattggagccataaaagagcatctgtgtgttttcagcatccttgtgctacctcccagcaacgcctccttcacgcactgcagtttgtgcacaccagggtaccagatactattaaaagcaccattactatgttttattgttgttggtaggtgcagtttcttcccagcgtttgctggaataacttctggaatttgtggtagcatcatcattaaggtgtgtggaaagtaaacagactcttgttcttcaggaaaatttgaccagggtagagaaatgccgccgccatgttggctcttctcatgagaatccaggaaaactccaggaaatgcacactgacaatcaaaacttgtagtactgatgaccatagggatgcggtgagggtgacatttccacagtaatgacggagttgtcacattcccctgagagagcaaaacagcttggtgagtgccaccatgtctccccgggactcccctctgagattggttcagagcagacaacagcaaatccttcccagggaagttgttctgcttggtgaattttgctgtgttcagagaccaggcaaggcaccctgacttttcctctgtggattcatgccgtagggaccctcacatcagctcatatgtggtgctttaaaatacaccccaagtcccaataaaggctgaaagcataactcagacaaaagtcttacactcctgtaggaaacaatgaggcagctggttagagatcagaaatgggacttgatgcttggagccctcctggtgcctgctcccagaatggcactcatttccatctccccggtccatcatctttcttcaaaggacgatgtgtttgtgtgaggtgtccctgagctgattttcccggaggtctggaaagggagcgggactccacaattgatgaagtcaagtcatgtgtctgctccatgctgtgattcgtttctcgactttgaaagaacaaccgcaggcttcagagtagcccgaggcacatttgtacaaagccacgtgggcagtttttggtctggagcaccaacctcaatggctgctttgaggcatacagtgcaatgctgttggaggagaccaggggagcactactgcacacagtagcccggtgtggccctcacgtcactgtgagctgcagatgtgtgcctcaggtcaggctgcagattcccacgaaccctccaaccgacctcagggttctttatgctttgccctttaagaaaatcaaatatgtgtttaaataaagacttttaaagactaaagaactcagagactgtggcaactccttagcaggtttctttcccctcctgttaaattcctcacagccactttgatgtggctgatgtggctaacaattgccactggacggattctaagagactggtttcaaagctgactgacagattaagtagcagctaccacaacagaaagtggttgtctgagtaaactttagctgttttcccagtcgcatttggattgtccatatagaaagttttcttgatatttgctaccaacacataccttttatctccctctaattatcaagaacttagtgtgtaacaggaaatttcaataccaaagtttttcctctttgtaagtaatatgtgccatggtagagacaggaaaacataagaaactaagaatgtgaaaatctcctttcacaccaccgtagacatgaagtgggatttggagtttagatgaccccaataggctggagtgttgaaagcctgatttagaatggtggagcatggtgtgcattgtcagcatcagtccgagctctcagaggacgcctgtaacacccaagccgaggaggatcctcagtgtagacagggtagtgttaatgaataatgactgatgaaggactgacggactgactgactgactgactgactgaatggttgactgaaggactgaatgtgaatgactgaatgagtgaatgactggatgactgactgaatgactgactgaagaactgactgaccgaatgaatgaatggttgactgaaggactgaatgtgaatgactgactgaatgaatgaatggctgaaggactgactaaagaaatgactgaatgaatgaatggtgcaaataggaaaggttttgtggacttgaggcaggacctttctgagaaaacttggtggaatacatccttcagtttcttactagaatattgagacactgttgggtttactgaaatatgtgaagtgagtgggagctacagcagaacagagtgtcagaggagagagcagcccttctgtttgctttgtggcttcaagatcaatgaggagcccatgtggaagtgatctgtgcggccatgctctcccctggacagtcactcgctggtttcaggtttttttggcaggctctttttcccagtagattattttctattagctaatcaagggcttctggtctcacaatctcagcctcctctcctactctcccccatgtgccagggaatttttcttggcatttaaaaccaaaactatagactggctgtgggaattctacttggctgggggtaaaataaccaatgattgcacataattgcagaaaacaattttgaatgttattaatgaggtgttctaaacaacatcttttagccctttgtctcacttagcagctgattcacccaaggttcagtgtactgggattcacagtcatctcccccaatgacagctccgggcccttgggctttcataatcaacacagctggtcattttcagggggtatttccaaggctataaagtaagcaggcttgctggagagccacacaccttcagctccatccatgactggctgtctttatgtggcgtttcctttccttccacaggcatgggaagtcctgaggttagagatgctaagggcaggtccctgttggctgtgaatatctccgttgcctttcatttccttcctatcacccaggcctcagcatctctacagcaggtcaagttgtaaggtgcggagcagggctcgtggggagactgatggagtgactgtaggatgctgtctttcagtgtaacctgagaacagggcatgtgtaggtcagtactgtggaccatggagaccgaagctagcccactttctatttcctagaatgtctgcagctacccagagtggctgcctgcctagtaattatttgttgtctgtcccactgtctgtctgtcaggcactaactgctctataggcattgtctggatgccactgttatttatttgactatcagagtgtaagccccttggggtcaaggaccttattgtcctggctcagtccttgtatctcctgtgcagcctagaatatactagacacttaagaaatgttaacaagcagattgatagggaagttgcttaacagcttgcaggtgttgtgataaaatacttgagactccaactttaaaagagggaaggtttacttgggcccctagttttggaagtttcattctctgcatcttgatctgtggcttaggacccatggagagtaattgctcacaccgtgatacctgagaaataaagcaaagagaaggggtagatttgacacgggtctgaaaggggcttgtatcgagtgagctaacctcttccactaggcttcacctcttttttcttttgtcttttttacaaaccccatttttggaaacagtgtctcgtgcgtgctagctttgccttgcacttgctgtatgaccttcctgttgggaactcgggctgaggaatgcactcaggacacaggggcctttgcatcagagaggagagtgcagagacaggcaggactgggaggggaagagaaagtgatgagagcactggtgggtcacagagagagttgggaggctcaggtagagcaggtgaccccttcacccagctggaaccaggaggccctcatggagaaactcgctggaaagctgtcaagattctgacaggaggagaggagagaggtggagcactccaggggtgagcttcaattgtattcttatgagggacattgaaagaaacctgtagtttgaggggagaatgtggcataggccaggggttgtatatgtaaaagtaaccttcatttgccagatgtcattgttggctctgagacttcctgctgaataccctcaccttttccagttcttactgaactctgggtggttggttgaactcagctgttctggctcaaactcctttccaagctgactgtttcaaactagcttctctcagcttctcactgaattgctgtgtttggccttaaagtaactctggcagtctgttctaatcttctgacttgttctcattctctggctccttctgtcacctgcaaccttctctggaaaactgtcctggtaaaactgcctccctccccctccctactctcttaagttgcccctctttcctggactgttctcatgagagttgggcatatcttatctctgattcatcactttgtctctcaagtagatgtcactttcaaacatggctgcttccttctacaaactaacttcaccttcattgtttggggttaaaggtgtgtactaaaggtatatctgtgttccagtcagaaggattaaaggtgtgtcagtccagctggatcacacagacctagaaggtctttggatgtgatcccttttcagagcagccatgttgctggattaaaattcctcacaggcttggttagaggaggagagagcacaggctagaagcagacatgggatcaagcatgtgctttgtcacctggcagtgaggaggcattaaaggttgatggatgccaggtcctgtgacggttcccatggtgatgttggctaggcatcagtgaagatgggccggtgtgtgtcttacagtgatattagctcaagtgtggggtcatagggaacagaaaaaagaaggtgacagagagacttctattccatgtggtccttaagcagcattcaggataacctggatgccacaggaaggaagacagtcccttccaatggtcagagggttctttggtttcttccaaaggaaaatctatttttctctagggtttcaccttctccctcagtagaattcagtgtgatttcattgtatctgagagggcagtgctaagggttctctcaaagcaaaaactggtggaaagtgagttttcagagccaggcagggtggccatactctaagctcagcgtttgggaaacagaagaaacaggagtttaaggtcattttggccctttggcaacctgagcttcacgacgcactgtcttaaataaccaaggggcagatgggttatcccaagatgagggattggctctctgagtctggagtctcagtgttccttgatggaagagttcatccagttgctagcacaagggcagccaatgttcggagtcctccctttagcacctggctctgtgtggaacatccagggatctgtggtttgagtgtgcctcctcaaaactttcatgttggaaatggaacccacaaattcctatcttgaaggtattcagagttagggacattggggtcacatgagttcattatgatgtgactttagaagagctcagacctagtgtgtgggctctgtctcactacgtgatgccttccctaggttaccagaatgccagcttccagagctgtgactcagaaaccttctgttctttataaatcacacagtttcaggtacttggttatagccacagaaaatggactatagccgaggcttctacgtgcttttcttcccctaagggagctagtcatagtaaaccattcgctgacacatttgcccttcccttctttccacaaaagaatgttcttttcttcttgggacaccacagtcatgttactttttccagtccagaaatacatcccaaggaagcacagcagcttttctgctcacaccaagggaatgtctgagtgggtttcgtgtctgcaagtgtgtgtcccaggggtgagtctgaagagaaagcctcaccaactgttgctaagtggagtattcccttgtgaatagagctcactttacagccaaaccagactctgccttgtctgggcgtggacttgagcctttgccagaggatccccagacatcttcccaagctcctgtgtggcccaaggtgcttgatcccagtgagtcagagcagaaagctgctcgatgatgcacaccagatatctgccaccaagagaatggagttgtccttgtcaccaccacagctgtccaatttcctagacaatttttttttggtgtctgtacgcatgtctgcatgtggatgtgcatacatgagtgtgtacgtgtgcatatggaggcagaggtcaaagccaagtgccttcctctatcactctctacattattgtttgagacaggatcattcactgaacccagagctcattgatttgaggtggctggccatcaaaggaactccagagatctggctgcctctacccaggccttggtcctctcctgcgtgctgggaaatctaaactcagttcttcacgcttgcggaacagggagtttattgaacgagccgcctttctagccctgcagcttccacagcttcccacacggtcctgctttgaaaactcaagacagctgaaggtgcttggtcatggcaggctggtcacccgaggtgccttcagatccagggtcactccaagttaggctcctggctgggacgcttcctggtgcacccacccacagatgctgctctgggccttgtttcctgacaaatcctccagatgtggtgctactatgtatgcagttcttccacatatccctcatgccccccctcccccattacccaaagacccagaataaagaaattaaatcttctctggcctttgtcttctcctactatagtcatacaaagaaagacttcctggcagggccatttggttccttcttgggaatattcctgtcccctcccaattattgagaaaaacaagtgaactcgttgacaccacactaagttaatcgtgtaggtgtccacttggcatgcacccacagaagtgggctgggttggggaggctgaagggctgggctaataaggagctattgcctctagcacagtgctctgggcctgcagcagggctctttagccatacctatgtgatgcttaatattgactgtcagctggacaggtcttagaatcacttagcagatgagcttctgtgaggaatgctctagattaggctaattgagatgaaaaggcctaccctaaacatgggtgtactgttccgtgtgttccagtttcctactgacttaaaaataaagtgagctgaacacaagcattcacttctgcttcttgacagccatggcttgcctgctgtgaaggtcatatgtacccttgaactgtgagctggcataaactatatacccatatatacccttgaacagtgaaccagcataaatgctcccttacttaagctttattttataattgtgtgtatgtatgtaggcctgtgtgtgcatatgtgcacgtcagtgccaaggcccttggaattcagaagagggagtctgatccctatctctgtagttataagtagttgtgcactgctctgtggggatgctgggaactgaacttgggtcctctgtatgagcggtgtgtattattaaccactaagctgtctctccagtctctgctttaagttatttatttattaattaagtgttttagcaatgagaaaagaacccaccattcccaggacagcttgcctgcgatgctctaggcaactgggagacagggctggcctccacttccctgcctagcgattctacagttccccttttagaaacagccccatgctctcgcacagagaagtactttctttagcctcatttttgcagtataggggttagacacaggctttataaatggctttgctcctgagctatactgctgaccctgttcatctccactgttaactttagggcctggggatccagaaatttgctggtggccaaagaaagtcatggaaactggggccagatgttcctcctcttgcaggatacttactacctcccaggtcagctgccacttgggatgggtgcaagatctcttccccactccccgctctttttcaacatcctcatatagacagatattgtgctaattgaattctgagtaagatgcaactgtgaacttccctgcctccttctcctcctcctcacacacagcctggcctcaaagcttgtagagagagtcagtcttctgtttccatccaccctggtgcagggtggaagtctccctcagcttatgtgaatcctacccctttccccttagactcagagccaacacgtgtacgctgatgtggctctttgtggcattgccatgagaggagggcatgctgtggtggcaggggagtctgttgtgtgcccaccctcctctgccctgctcctgtccgtcacaggccacactttagagcaacagcatccacttgttgggcatttaatacccatggatcgaataaaattgttttgtagctagaattttccatgactgtaattaccaaaagattctagttgttgctcgtgggtgtcctccctggagctgccacggaatgagaagctgacctaattcctctgtagttcaacttaataagcagccttaacccatttttaggtctattgactgataccctttgggtgagtgtggctttccatggtgggtgtagagatcagatgtagtagggtgtttgtccccccaccctgttaaactcactcatttttcggttcacagcaatttaggtcaattccagcttttaaagaatgaacctctgtaggaagaggaaattaaccagaccttaagggggcctggttaccataattggccccctgagaacaactctcaggctgataaagctgggacaggaccccatgactacttcaggccatcacctcacatggagagcgctgtggcttttcctgcttcctgacaagtatggtggccggcagtgactggggatgtgcttctgggtgtgtgagcacttggctggcacgtgagaaaccctggaaaaaataataaaaaagatgtgtgttacaaccctgacagtcttcctgtttcttctgttctttttgtgtctcccccgccagaatagactgcatcctctttcttcttgggaagagggctagcgaactttagtcctccacaggacacaggtgtagggcataactcaactgaggattgaggactttagacgggaagactcatggcaaaggcagggcacggggacgaaggtgtggtcaggctatcattctatcgaccctgaatataaggggcacaagtggcccttgagtcacagacatttttaccatcatcaagaagcctttctgaagtgtggatatgaatgcgggccttgtgttctgacctgtcttctcagtttcctgtcctactgcaagcagccttatgttcccccagcacagtcaccatcctccatgaacctccctgtgcattccctgtccttagggactgtaccctctcagagtgtgagccaaaacagatcccccctcccttgtttttgttacatgttctatgacagcaaaaacaaaagcaacgaatccactgcccctttccacgacatttcatttctgaagggaccagtagccaagagtggatcagggaaacctgttccttgcagaagatggacagacatatagctgacacatgggggctcactgagctcagaggtcattccaaacttctctcatctccgaggccagctctttgatattggtgtatggggcaatttaatatgtttttacatgaaaacaattaacattttaattggttttgttttgccatgcccctttctttggctctgtcttacctccatgttctgtttgtcactccatcctccttttattcctttcttaaatgtacaatatagagctttaacttagttttccagaactttccagactccttcaacatttgcaatagactttaacattacttctatgctgaaatttgatttaagtgaacaactactttctaaatggcaattgtgtcctttcaccagactaggtcattagacttgagatgagtgctaagtagtgatatggatgattccctgggaagcacaggtcttctgggaggatggggaggagagccaggtgtaaaactctgctaggaggaaggatgtggtcttcctcaggtcctcatgcttgagcggcaagaactttactgataggcccatctcccttgccgctggaatcttttccttatggccatttctttaggtttctcttcttccccagactcatattttcacctttatcacaagaatccacacacatgagaaaacaaagtaggtacctacagtttgagactgcttatgtgtgataatcagttttttcttactgtaacaaatgcccgaggaaatcaactttctaagaagacaagttaatataggctcactgttttggaggtttcagaccatgtcaaccatggttgacgggctttgttgacacacatcaaggctgtctgtcacagacgtgtgtagctgggaagatctggccacctcttggcagttgtgaaataaagagaagatgagaaagagcatccccgtatctccttcaaggtcacacttcagtgattagcttcctcccactgggtcccacctcctagagctctcaccacactcccaagaacatggtgggtagttgagtacattaaagacccgcagaggaactttaggattgtgacctcagaggtccagtggtgtcttgcttgactttttcccaaagagatagagcaagcagggtgcttggagttcatgttgtaatttgaaaactgaaaatgtgccctgtacttttcctttagaaagacaggattttggcttgaattgatctcccaagatttcccatgaaaggagaccagccccaacctcataatgacatcacccatttctccttctttgtctccccctctttgcagtgttgagaatgggactcagcatctttctcatactaggcaagtgcccctcccccccaactcacaccccagcccctgaactatgatttcattggaatgactgaaccaaaaagaaaaaagaaaaagaaaagagttgcaaatcactccatactgtgtcaacatttcctgaagacaaatagctctgttttttaaggacgctcaagagcagatggatgtgtgctggttagaagaagtctccctcctatgttcctgaacaaggtctccacactacccccactatctccttagtggtccccgggaacaaaaggcaattcagatcacagaatattacttctctcgccacagcatcacactattaaaaataaaactgtccctcaaggcaaaacatttcatttattttcctttgaatgactaacttgtttattaagatgaaccaagtggctacatctagatggagcacaggcaagaaaaattgatttatcgtaggcttttggaaagcaggctttgtgttctctggaattatctttggattttaaatgaagaagagccatttttgttttgttttgttccccaaaattggtgtggctgggctctctctcggatgactatgcctcaggtagttcggtcttgagtagtgtcccatgtgaccttgcgtcctgtggcagagcatcccctgagctgtagcaaggtgtccctttgaggcagactaccttccttcttctgctgcagtctttactgtttaataggcaaacatcccccttttgtctcatttcatgcttgagaccctgtcagactgcatctgtgttcccttcaggtttccacaaccacctttgtgttttccaggcccagtcctgaaggagctcacagggagggtactgtgtcactagggaactttctattgctgccctttcctctggagacataggatgtgtctacaggctctcctgatcaaagctctgttctaacgtggtaaagcttgaaagaagagaaagatgtaaacaattggaacaccaagagaccccacccattctgataaaccccacccattccaataaactctacccactctgataaactccacccactctagaataatatggataccttgtaatttccttatagaagctagatgccaaatgacacctgccttcctttaggtggtgagttctatttggcgttacacacacacacacacacacacacacacacacacacacgcgcgcgcacacaccacattatttctgtctttgggttgttgtctgttaaagataattaacctcattttttagatgaggaaattaaagcttgctcaaggacatggattgagcagtaatgacagccaatgctatcagccagttacacactctcctgtttggtcatttccaccctgttggtttggttttaacgtccccccaattttataatgtgagctaggagaaaagggtccataggtggcacatcatcttttctgttagacagagtctcattttgcacaggctggatagtgttaggaacgcaggcatgcaccatcattcctggtgtgtggtgctggggcttgaacccaggactgggcatgctgggccagcactctcttaaccgagctgcagccctagccccagtgcaccatcatacttaacaaatcccaatatagtgaggtgataggtggccacttttctttatcccttattcacgatgcctctgaagagggctcaccctagttctgctcatgaagacctttttgtagcaggcagaaggcagaggtcctggtagaagacacagttcctgaaggctgggatttccaggggtggccatctggttttctctctattggctcatgccctatgagcaataagatccagatccctggggggacagatcaggcctgtggcttcttactggagcgagttaagattgcctccccattgtggttctaccccctgggtctagtttgcacaggatgagcaggcgtagcatcaggagctatctccccaaaggaagaggatggaattcaggtgaagacccgagggactctatctgttattcctccttggtcccctctccccatctaaggcacaaaagaacagataggaggaaggggctcattggaggctcagtgatggggtctgatggtgttttgttccatcttttaatcacctctggcagaaaagcatcaagtgttccctcatcccctgaccgtccaagccagcattgtgactcagaaactctgtagagaggcgatatgcacggcatggtgttattaaatctccagatagactacttaggactgaagaagctgctctctgattttcacatgtgcgttctggctcagaactttctctgcttgtttgtttaattgctgatctgagactgggactcagggtgatgcgtgtgctaggcaggagttctggccgtggagcacatcttcagccctctaggcaagaatgtcaatggacaagtatgtgcactgtcccttgccatgggcgtgctttataattccacacctgtgaattaatatactgggtgagtctctttggaaaaggaatttgggacagaacaaaccactgaacatgcttggctcttaagtcctgctctttacccatgatgtctgaaaccctgcggagctctcactggcgcctccgataggctctcctggctggcatagatgtgtctgtgacacccagccagaagggaacatctgctcatgttgcctttggaagcagatctctctgcccttgagatctgctccatctgagaggaacgcacagaagctagagtctcatgtgtgtccctgaatggcttttgggacaatctaccctttctgagttctaggactggctgaagtctgtggtgctgtttcttgtaggagaattgctgtgaggggagtgccgggagataaaggccatggcccatttcttcagggagagtttgtggtgtctcctacagggtattgctagtttcacactgaagactggtgggcagggctaggggtgtagcttaattggtagcatgctaacctagtacgaaggaggacttgggttcagtctccagcacagcataaaccgggcctggcagtgccagtttataatccctggtcttgggaagtagctgtggaaggatcagaagttcaaggtaaattttagctacatagcaagttcaaggctagcctgggctacaaggagactctatttcaatcaactaaccaaccaattaatcaatgaatcaatcaaaatactgggggcaatgagcaaggagtgggggagtaggaatagaaaagagaagagtaggctattaccctcctgctttagaattgctcatctgcttcttattcagaggaacaacgatgagaaccagaaacattgaatggcttctgagatcatctgagaacactgacaattattcttacagagaccctgaagggtgtgtgtgtctgtgtgtgtctgtatggggtggtggccgaggctgagatgtgttctctgaggcatgaaattctacctctttcgaagagaggctaaattcatttgcagctggtttcccttaacctctcctgacaccagcactattccagaaaaccacggaatttcaaaatagaatagaaatcatctgagtgtgagtgtgcactccagggcctgggtgggtttggggggctccagcctcagcagttttatccacccctggtgaaggttttcacactgcgtcaccatccttcctctatttgctagatgctcaagtttaagcctgggaaaatggagatctggatgaaacaggcctcaggggactacagtggccataaaagccaaacaccagcccaagccagctccatttggtgtgacctctgatgactggctggctctcagttggtgtcagagaaggcacatggtggcaattaagtcccaaagtgacattgggagaattatgctagtgagaaattgattttttccctccagtcttaaaaaaaaatgcaatctgtctttgtccaaatatttctgaaacagcaggcacagcaacgtaaggatgggttgctggcatcactgtgaaggcgtgggaccaagccaaagagggagaaggcaccagggaggcaagggatagcatcctttgatactttctcacgagctgctagcagtgtgattgtagggggccagtgagtggggtcaggggtggcccggctctcctctgaggctgaggaaaaggagtccccccctcatccacctctgtccttccgactcgactgccctgctttatgctctgtgtttgcatccagcttttcacacgtgaggagctcaggcaaccaatccaagttttcagtgcttctgagattcaaatgtgggttttcaaggtaatgttaaataatgattttcagatcacttgaactgtgagggagctagaatccctgagctcttggtctgcaaactgatcaaaattgattaattctgatgcgtacttagaaagctttatttttttatttttgaggcagggcctcatgaagcctaggctgacctcacactcgctgcatagctgaggatggcttgaaaactctctctctctctctctctctctctctctaacttttatgtctgtttctctgtgtgtatgtgcttgtgcttgcacatgttcactggctacatgtgtgcaggtacctgtggagtcccagaggaggacatcagataccccagagctagagttagaggcagttgtgagtctcccagtatgggtactgagctctgttctcaggtcttctggaaaaggagcaagtgttctaaactgacgaaccatgcagggatatagccctgaaacgtggtaagtgccataggaacttaaaataaatagcaattcctccaagcgcccgggatcctagttgtagtcggtggtcaggtcagtatgttcacctgcataggaagtgagcagtgaaggctaagacctgttgggtgcaaattagcgaggggagagagatcaatgatcataaccaataacaggtaaggatagtgctgcaggggcatgtccagaaaggacacaactcatggtagaaagagaaactctggaagacctagaagaaaatgaaggttacctttcatctgctcttataagaatccttatccaaacctaacggcaagggaagagagagccgtgaacacgactgacaaatgttaaatttcaagaatgttcatgccgacccagctgtaaagctttgaaagggcacaaaattcaccgaccgaaaggaaaacagataaagtagaggatgcttttcatacttttttttttttgagggaaaacttcaaaaagagcagcctaaattaatgagctacaaatgacactcaacactgggaaaataatgttaaatgtaaaaagtacaacataataacatgcccaaccccttgccttcctatgaaaaagcttaaacatcaagtaaacctgaaagagttttgcttatttttgaagcagagtctcaccatgtaaccctggcctgttggaaactgggctgacaacagactcgaggagatccgcgtggcctgcctcctgagtgccagggttaaggctttttaccaccatggccagcaaaatgaaagattttttttttaacagtaaattactgaatgccatgaatgcattaagctatgaaagtcattccatatttgctttataacacacccacttctaattcaacaattttcattttggggtgatttttctgcccaatatctgcagacacctttgcttgagcagattagggtgagggtctactttcctactgggtagaggccagaggtgggagtcagtgctccatatctcagggaacaagtcccactgcataacaaatagcagccgtcatgtggttagggaacgctgcatttgttcatcgtatgtaattcatcttcatgtatttcaaagatgaacatcaatgaatgttcctttgaatgtcgaagtatacatatcatttgctaggttttagtgcttgtttatagtggttttctttctctgtgaaagttaatcatggtgtaaaacagaatcttaagtatgttaaacatgtcttcacagagtttttggcccatgcacacacctgtgctgcctaggccctgtcaggtacagaacattagcacatccccctccctctctctaccagacacaggattggtctaacttcttctcaccacagatatatctgttctaggactgtacataaatagaacactaaagtaaattgttccacagtatccctagagattgggtctaggaggctttgctttccaggggtcggttcccttatattaaatcactatctatctatctatctatctatctatctatctatctatctatctatctcatatcatcacagtatgacttataataccaaatccatgtgtgtgcaaaagatagatagatagatagatagatagatagatagatagatagatagatagatagatagatagatagaatgtgtacgtttaccaggaaaggctatagcaattagatccctgggcaggaaaaactaaagtcttccaggagagtagtacaggctcttaactgctgagctgtctctccaacctcatgataaaagatctacaagtaatctttacactgtattgtccagggaatgacagtgaagaaatttctacatgttcaatacacttgttttgcttttatttcaaatatttccaaaggttacagcagggtttgttgaatctgtggatagggaacctgcagggagcaggacagaatctcttcccttttgttgagccagctaatgaacacagcaaggcagccctcagggtgctctgtgtgtctctgggcatctccaaagcctgctaaaggagtcttgagtttaacagtagttttcataataatgccttttcccctcgaggcactgtgctgacgacatcaggacatcagcattggtggtatgaaggcaattgttgctccaactgttgctgcctgggctgaaggggccatgacacctctgttgtacttttcattaacagtcacttgtagaaagatgagccagggtcagtagtgtccatgttaaatctaagccccccagaacaagtgctctggcattaacagatgtgactttaaaggtaatatgtaaggcatgcctgcacaaacatttgcaagatctgcttaacttggaaccactggtgacataggcatggttctattctcacatggatacaagttccattccaaccaaaacatagttacaatgagtttttatgtaacaaagcacaaacgtttattgatatggtttctagttttacattacaactaacttttaggaacccaccatttgtggacttttggtttgtaccaaaagccaacagccatcattatctagatggctattaacatagcccatcgttttccaattacatatctgtagggtgctgtttacacacatctcccacaagaatgtagcacagcagagtgagtgtagggggaatgtgagatcactgaagagatctgcaaacgtctttgaaaagaggctccataatgcttgttcattgttgtttttaaacttggtgaaatagttaattttctcaaaaatatgttaatttgtagtgagtaaattaacacatattctcaaattttccatttttaccttctcttataaaatgtaatacatgttagtaatctcgtgggttctcaatactttagaatataaagaggtcccaagaccgctgaatttgagcatctctgatttccatattccattgaaagcatgtccatgtcgttttgaatgtcagaacttcgctctttttaattatgggctgtgttccgtcctgcacatttatcatagttgtttattcttcttttaatagacatctgggctgcttcaggatctggagtattgtgaacagaattatgtccagtcttatacaaatgtttgttgaacaggcttttcttcctgaagggtaaatactgaggagataaattggattagtcaggatgcaagtgttcagcattactgcgtaagacattccttggtgttttaccatctacagaagtttgtttgctgctttacatttctgtacaacgtatgggtggtaagagcatttttaatgaaattaaaacagaagcatgcacgcatgtacatacatgcaccccccccccccccccccccccgttctcatctgtgcgactctagaatttgtagggttaacataacacggggtaaaactggaggcctagggtgtagctcaatgtagcccagcagtgcaaggctctgggttccacccccacagccacaaagcaaagcaaagcaaaagaaatcacaaggggagaaagggcgtgaggcacacaggtacctggatggctgagaccttggacaggaagtgctgccacgctgtgttctgccttctgaaggtcaaccaatgcgctgtgcccaggggagggactaaggcagcttctccttccaacaggaaatgctcagagtatccacgccatccccccaccccctggtcgtggttgctgtggctacaggtgctcctctcattcttctgaccctctggattgcaggaggcctgatgggagcttgctttggatgttcatgcaagctgcatctgagcccaggaaggagcccattgctcctacaatttaatagttcccaatgggaataagcagctgcttttttgtctggttacccttacccaactaatttatggctctcttgctaggaattcagtccctcagaatccaggcctgtgcaggtggccgaggtgagagctatactcactgcagctggcgtcagaggcaatactccttttctagttcttggggtggaatttaagcccaagtttatttacccttagcaagcacaactaacttttcttcttattattattttagggcattggataagaaggctcataaaaaggaggacataaaacagcttttactgacacacattatgctgatttatctgtgagtgggagctaaaccatatggtctagattctcttaaaacacacatggggttcaggattaagggaacaggcactaggcaaattaattttgcatttcaggaaacagaacaagggcgttcggtagtccatgattgctgtgtgcaagaaactgagtttagcgattcatactcacgactttgtctagtcccccacagcgtccccgtaataggctgtttttgtttttgtttttttaaccagtggtagacacagcactgggtgctgggccctgagtaacataggaagctgggaagagctagaatccaggcttcgtcccacagtgataggcttccttcctaaaatcttcagatcatgaaagacatgaacagaaaatgggatggactcgcagcccacagatcagccaaccagcccaggtcgttgggtaccatgtcatgttcttgtgttggctggagctggggctgctgaacgtcactggtcagggtttctccatgcttgcctgagactctcagctgagtatcactgcaggatcatgtgctgccggtgactctactatgatgtcatttcattcatgggttgaaacatcctgaagatagatgctctgtgggcagctcagtgcccatgaatgtggcccaaggagaccccgggtgcttctgcgttccctctgctccctcgcaggcgtctgtgtctctctcactgctttgccaaatgactcttgtcctgaatggctttcagggactaatggcaggctgggtgctctaacccacccatggcatgggcagggatttcaggttgaactgagccaaggaacagtcacagacaggaaagaaatcctattgatggcctctcagagtgggagatggctggtcatataagtttggacctggagtttggatggtgtggtgacctgttcatagtcccggcacctgggcagcatcagggaatttctgggacaagctgggtagctagacaagccaaatttgtcaaaatagcataacttgaacaaaccaaggtgcaaacctattttgaaagacatctttatgtctttgaaattaattggacccgtcatccaattggatgtgtccaattaactcttagcaaataaggatatttgctaaggaagtgttacaacagcataatcgggccaggttgtagtgttcccaacaaatccaatgatgtccgtaccactagaagctggatttataaagtgtggagggacccacagaagcagtgagtggaatatcgaaaaaccatgccttactgaaatggaagtgtgtgtgtgtgtgtgtgtgtgtgtgtgtgtgtgagcgcgtgcacgtgcatatgttactgggatcaaagctagaggcttgtacatgttaaacaagagcttactactgagccacaccacacacaggccaatcatagggctttctaagaagagaaattttgtatttggtaagttttaatgaaagataagtacatgtgggtttataggtctataggtcttacagatataagatatatcttgtggtattaaagacacatactcatcatagttgactttcatttgtgacattgatgaactcttccctcctttggctctctagacttggggaaagccctagcctagagatagttgtcaagccagggcatggatgcgctcactttcccctctgaagtcctgttgggtatctgtaattgatcttggcaattcctctttttcactgaactccataaataaaccgcaggtttgtgctcaccacagcacgccccaaagccatcccttgtctgtctgcatttgccagtaagtgggaattgccatccttactctaattgcttgggtctgtggccttattatgtgttatcttcatctcatttgtagagcgtaatggcactgcaaacatagcatcgcaacaggaatggcaagcccaacaagagacactgggtgcatttaattggtcaatgcacagtcgtgcccttcgagagactcacacatcgcagaaggaatgtcccagtatgtccaggaggttgcagaggctgtagtatctctagagctgttgtggacagacctgctttggggactggcaggtctttggcctcctggcttggggagcctcagtctccaagtgggaaaacccttttctccggtacttgttaggggtgtggcgggatagtgtaccagtgtactcagctgtgatccccttgcatggactaggaggcttttgtggtgtgagctcagtgggggggatcctttgcagctcttgcaacacaggcctgccattaatggtttctaagagaatgagagagcttgctgtgtcaaaacacagtgcctccctcagcagtcctgggccccttagccaatctgctggatactgggtggcccagaagccagctctgtagggggccctggcctaccaagtctttctgaaggtggtatctgagctgtttcccaccctattgtttggtaacacatccaactggtgcctgtggacactgtccatggagtcccccacttctcactcttttgggccaggttggtgcctgtggagagacagcactggcctttctttgcagttgatgtattcaggaaaatatctgtagatgttctgtttaaaggaattaggccatatttcaagattatacttcacaaggccataggtaagggtgtgtgccctttaccaagtgaaatttttaatggttcaataggatgtgccattcagtgttaaaatgagctcaaagcacagtcaggaggagttcacaaagtactgaatggctctgtgtggtaaagtttattagagacaactgggctacagtttcaaagacctcaagctatccccgtgctaaaggggaaccatttgtatgaccttagttttcttatatatcaaattttaagatggaggagtaaggtggtcttcagtctgggtgagagtggttctacaacaccatgatgttgcagtttggtggcccaaggagatagtgttctcctctgtgtccacaaggcagcactggggactgatattaagaatgggatggatgaagcagcattgggggcagcaggtaggccacacccttgtggtcaggtgtgtatcagcagaggcgacatcagcaatgagcagtgtccccatggcacttgctttggggaattggcttcagtggctcgcctttgcttgtgacatatactcacaccacatcccttggctcacttggaggctcatccctcatccagttagcccctcatgacaggatgacaggaatgaatttcctgtgaatcctagaatctctgaactttcccttgagcctgacatgcctttctgtggtcaggaagcaaagcaaaaattgccactctgctggatttaaaatagtatcatgaatcttacagttgtgtgtgtgttagtatgttatttgttcacggtctctctgtgtgaacatgttctctgtgtgtacacatatgtgtgggtatgcagacacatgtaagcacatgcatatgaaagtcaaaggccaacagccatgtattacccaatcactctccaccttatgttttgagacagtggctttcactgagcttagagcttactgattgactggcagcaagctctagggatcctcctgtcttctacctccccagtgcagggatcacaagattatactgcctggcttcttatgtgggtgctagagacccatattcaagccttcatccttgcatatcaaggactttagtgcctgagccacctccccagccctattcttatttttaccatctattttgatttttttgtatatgttccaagggttaaaattcaagtcctgtgtttgttaatatactttctcctatagccacccaatgaatggtgctcttattttagatttatagctatgcagtgactctaaacacatatactatgccaagccattaaagagttaaatgcaaatgatgccatatacacaccattctggagttggcattgttcctccatatatggtaatgaaatatagtccagctgctacatgtgtatgtgcacgtacctacatgctgacaactaacacacataaacagtaggacaaaacctagaatacctttattcaagtttaaagcttctgtctcattgtgtaaggaagtggcttatgtgcttctgttgactgacactgggaacggctgctttcgttacctaaggatgcttatgtgtgcactcttgtgtgtcttcttttgcatctacatggaaattctttgtagtactttagcagagtgtgtagtaccaagccgtagactcttcatgttttcaatttttttctttcttgccaaattgctctccaaagaggtcgttctaatggatgctcaccctgtttgtgctgtgctggcccggcacttgttcttgtcaaacctgaggtatttgccaattaaatgggagtgttctgataactcattgtggtggattgcattcccttgatcccttcggagatagatgttggttgcagatacatccagggttcttccttctgagagttacctgtttatacactttgcatattttgtctggtgggcgtgtgtcttatgattatctagaggtccttcacacattctacataatcattgtttttgttggcaccatctttttttggtcttgtttaaagagtttcctgttataccaaagctttaaactttaataaatatatattttttgtcccattgtttttaagatttaattttattattttcaattatgtgtaggtgtgtgtgtgatatgtatctgcatgtgaaaatgcacacatgagtacaggtgtccttggagaccagagacattggacccctgaagctggagttacaagttgtaagatgcctgatgccactgctagaaacctaccttggatcctctggaagagcagcaagtgctcttaactgatgagccatctcctcagcctcttcaattcttttttttttttttttcgtttttgtattgatttttcttgtcatactcttgtagctaggatctctagtaccatgttgattggagttatgatggttctgggtatttctaagcttctgttagtttattaaatatgatgtttcatttgcagttaaactgactaaatttttgtgagagtaagaaatgttcaattttacttcactagtatttcaaaatttttatgaatggaagttgaaatgttttttctatatttatcaaggagatagtttttgtccttaatattaatgagaaagcaacataagcagacttcctaatgttatactgttcttttgttgtctgtactgaagatattttgaggttggtcatggtagcacatgcctgtgattcaagttgggagcccgaggcagaaagtttttgagctcagggtcaacctgcaggaagtctatgtctcaagaaaccaaaacccaaaccctgtaagttttatttagatgtgtcctagtttgctttctattggcgtgatgaccacggccaaaggcagcttggggaaaagtggctttattttgccttacaggtcacagttcatcattgagccaaggcaggaactgaagcagaggctgttccttaccgcttgttccccatgggctgctctgctggctttcttatttgacacaggaccaccagcccaggaatggcaccttactcagtgggccaggctttccacatcaatcaccaatcaagaaaatgccctacaggcttcccacaggccaatttgatggagacagtttctcaaacaatacctcctctttctagataactccagcccaagttgagttgagaagagctcaccagcttgagagtttaatgtgtattttcatgagtggatatggctggtactttttgtagtcttctctcttggttagatctcagttctcttaatattaccacatcagtttgagactgcttcctccttttctgctctcttaaaaagatcattacaacttgtattgataaagtttgtcagattttacctgtaaaggtatttggacatggaagattaattatccatcaattagtcatccaccaattaactaaccattaattaatccttaattggtgattaattattaattaattaattttgattaaacaaactttcaagacaagggtctcgctatggagtccaggctggcttcaaactcatgaccctttttttttgatctcttgagtgctgggatttcagcatgcactaccacatctaatagtcaggagaatcatgtgtgtgtcaattttaagtcactaatttcatatttttaaatgactatagaagcgtttgctgtttctacttagattatcaatttttattttattatttttatctctatgagtgtttgtctgcatgcatgcctatgtatcacatatgtgcatggtacccaaggaggccagaagagggtgctggatgccatgtaattgaagttacagatggctgtgagcacccatgttggtgctaaggattgaaccccgtgttctctgaaagtgttgccagtgctcataaccactgagccacctcccaagcttctctacgacctacttttaaatcatacatagaggaaacattttattatgtatatagaattttcagtcattctttttctctttaatattatgggtattttgacatcattatacagtcactaaggagacagggttttttttttttgttgttgttgttgttttgttttgttttgcttttgagtcagagcctttctacataagcttggctgtcctgaaacttgctctgtagaccaggctggcctcaaattctcaagtctgcctgcttctgcctcctgagttccagaactaaaggcacctggctcaagaagacagcgcttagaatccttgctttatgcatttgctcatttttgtagttgtcatttaggttgggtcacccaagaacaaaggctgtcacttgcagctgagaaggtcacttgtgtaatgtatgtagtgtagttagcaccaggaatcagagcagacactgatttctgctgacatcatgttctagtctgaccagacactggtcacttcccagaaagctgcgatttcctcgtgcttgataggtcgagggtaaaggtcgccatgaaaatgaactgtgcagggcagggggtgggggtgggggttgggggcggctttccttttcctgagggaagaggtgacacaatcttttggaatgccggcttaccctgaagcacatcctgcctggacagatgagctcagggatttgggcccaagtgggttctgttgagagatctttgcacatagttctaaaggcacacaaagatggtgggattgcagttctggaggacaggaactggaaggacgtgcaccccactccccatggagctcaggtcctacagcagtgtataacactctgtgaaactattcttgatgtccgtggaggtcaggctccttactgcccacgtgacctcacggtgctgtgtaggtgaagtatggatagctccccctcccaagttggttgcgttgattccgagtcttaaatccccaagagttttgcttctatacctgtttttaacagcagcaagacactatctcctcctccttccatgtccttcctctcccctctctctcctcctctccttcctccttctcttctgcctccttttcagtactggggattggatccaggtattcatgcatgctaggcacatacttgaccactgagccataccattgctcccatttacctactgtataaatggtccaaacattccctctgtctctgttcctgcctgcccaaattattgtgtccagctttcctgcatcccatgtcctttgaagactctagaatctctcattgagttttctcaattggattggatcagtgtgaaactcttttgcactgaattcaaacacatgattaggctgtcgatttctcattttaaaaggcagtccccaggcccaaggatgtgactcagtggcagggcatgtttttagtgtgtgcaaggctctgaccttaatcctcgatgatgatgatggtggtggtggtgatggtgatgatgatgatattaataataattatagaaataatggctctccatgatctctatctgctatttctcagaaacacattgaacccctacatatcacatatgtactttctgctcagctcagtctgactatatgccctgtcaccacccactgcccacacctgactgaccaaccccatgatctgggcctaaaacagcactacctctcttaggaacagcaatttgtctttggttcagattcctttattccaacagtttaaaaagaaaagtccttgcaggtctctacaaatctcacatctaaagctttatggagcagattatttctttaaaaatattgttgtctttgtcttcctagcagatagtaattttgaaattgttagacacacacctgctggcaaaggggaaattagttttctccaatggagtgtcaatgggtatttcagccacatttcagggaaggccccatggcaagaagtagctagccaatataaaataggctccgtgtgtgtgtgtgtgtgtgtgtgtgagagagagagagagagagagagagagagagagagagagttagagttgtatcacttagttttgctttggcattttttgttttactgggtttttgtttgtttgtgtttgtgtgtgtgtggggagaatacaaagttatgtgggaagggattagagaggtggttgtgttgtgggaagagttatgggaaggggaacccatgatcaaaatatattgcatgaaaaaaataattgaattaagataaaaaagaaattgttagccagagagatttcccactgcccctttgttcttgaaactctgagtgggtgaatgggcacagcctcccccccctcagagtcactcaaagccacaggaagggggcattttgcttctttccactcttgatgccctactgggcactctctgctcctgccccattgttctagacagcctgcagggctggacatgcctcccgctaggcatacagctaagccagcaggcatgaaaccgccatatgcatcatctcaggacacttggaagcagacagggaatgtgagagtctgaagggaactttgtctcccactggtccagcccaggaaactgagtccaggttgcgttatcatgggttgcggtgctggtggcagcctctcccactttctgcacctttggggacttggttggctttggatagcacctctatgggagggagcagatgagggaacctctgaactatttcagtacacctttcagagagtgagagggaggggatgcagagctccccttcattgtccctggaattcttgttctctttgagtttctctctgggggtgcattgtctgagtgtgtgatagatgggcttcctggtgcctggaagtatgttagtagaggttgctagaagctgagagcagagatgattgcttctggaggtgagtcaagacgcccacttccctttgacctggtggtcccaggaagattgacagggcacactgttctagacaattctagactgttctagactattcagcatctatcaccctccattccctagccatttccccaccgtgatcatgacccatggtgtttattgagcacccatgcacaaagtcccagcatctacagctataacacagagccagactcccaggaacgactatcctccacccttggaggcacgaccacatatgagaagtcaaccccacacctagctacccattctggtgaggcatagcttctaagaccaacgtccgtatgggaaggggaggtctctacacattttgagagcagaagctgaggctccgtcctaacctgaggggctcagccagctttctgtgctcccccgtggacaaaccatggtgttgtctttggatcaggatcaaagctctttctccactaacccgcagaagagagccggcaaacaaatgggagccataaaatagagagaagttacagtgaaagtttgtctgatgcgattagcagctggccacctgccagattccacctgctctctctggcactgtggtgtctcctcatggcatctgacccggggcctggggcaacaatacgctggtctgtgccaaggataacagtggcatagcagccccaggagcaggccatgagggcaacagcatgaggtcagagcaagcagggcctgtgggtggggccatgacaagaggccatgctgcacaggctaagggtgccggcccctgactcaccctgagtctgggaggttacctaacatgtctgtgcttctgtttccctctgtgagaacctgctctcccatttggcaccctctttagccaactggcaggaaagcaaagccacgacacctggaaatcacaggtgccctgcgtgttgtgcaacaggtaagcgcccatcacgttgcagtgacagtccctgggtgcagaaccagctcggcctgcggaggagggcaacccatgaagtgactgaatcagtaatgggtcatgagatcctaggttgggccagcatagctgtatggggttagcacattgcacagtcgccctgagccatactccgcttactgcggtaaggcgggatgttggagaggataatttcttaagagactttcctgttggttttcctttaaatctggatttgtacatgctggagaatactctacttcggagccatgaccccagcccctcagctcattctgccgtttgcctgtctgcttatgtcactgcctgcctgattggtgggaaagcctgacacacaacctcaaaagtcctctctctggcatcagtggatggccactgtcatttctctccagacagtgaggaccagtgccccatcactaggactcacaggtgtcagttactggcagggttgctggggtctgttcccgtgaatgtaaataccctggccaggtcagcagcagtcacaaagcccaaggaagtgagcttgtctgaattgtaaaagtggaggaggggtctgtaagaggggcaaaggtggggtggggagagggggctctctacctcttatccctgggaacattcaccctttgagtaatacctgaagaccagatgtttcagaggggcttccctgctgtgtactaaggtggagctccaaaggttggtgaggtgagaaggagggtacagtcctgctaaggttccttatgagagagccgatcctcctcctggactccgcctactcccccttcagtgctccccatgcaaggccttaagagcttagcctgcagataggagaggacttgatctgtgagtgtgtaggactcttgaagaattttattatgtctcccttcccctttctttcctcaactccccccatttaccccaactttgctgtcattcaaattcatgacctctttttctttgtaatctgtctgtccatccatccatccacccacccaccatccatccatccatccatccatccatccatctatctatctatctatctatctatctatctatctatctatctatcccaaaatacatagaaacagcctgcttagtccaaatgtgtttataatactggccattctccatggccttgagtgtttcatcatgaggctgtgctccatgtacacacataactggctggaattcccttcctttgagcggtaggaaaagggaggctcttcatacactctggctttcttttgctaaatggaaatgtcacgagagagtctgcatcttcatcatcccccccccatattgggcctgtgtggggtgagtgtgtagcctggactcttagcctccttttgtgcacagccccagcacagaacagtgaacacggttctccatagatgtgtactgatgactgcttggccaatggaggcagatgcccactcttgacactttgtttgttttgtttttgggttcttgacatgcaaagtctaaggtctggactctggatctgacattaatgacatctctcaccacagtagcttttctcatgatcttctgatcactgagaagtgctgtgaacatgttgaaatatcctgtcctgtctacacaggggtgtgggctactgcaggtgggtcctggtgtcagtactgatgcccgtgctgatgggcaggttgggtgtgcttgtgcacttgtctttggagagcctcattttcctcgtgtgtagtatgcacacccaagtcactattagagggaggaggagcagaggggcagccaccaatcaaagcaagtgtccggttgattgaagaaaagaccagggacagctgaggtgatagcctggggcagagctatgcatgtgacttgatttcccaggtgatagctacttgtttaacttgctagttggctcctaagggacaaagaatgatgtagggaaggtctagacatctgcctgtgattttactttttaatttcttttccaggtagagtcttcagtggggcatggggggggggatgctggcttcctggagggatctctcaggagtctgtctctggcagtagaacacaatgtttaaaaggatgaaaggtatttcatgtgcgcacacacacacacacacaggcacacacaccaatgttcagggtttatttaggagaacattctccttattctccatgtgtagttggccttcattacctgtgggttccacactcatgagttcaagagaccaccagaggaaaatacttgaaaaagtaattagatatgtagtgagcatatgcaggccagtagtccccagacaactatccacatagaacttacgttatattaggtattataagtaatccagagagggtttaaagtatatgagcacatgtgtataggtcatgtgaaacattatatatcaggagctggagaatctatgtggaatttggtatccatgggatcctggaatcaagtgtgactctctctcttttattattttgccattacctagattgcctaaaagtctctcaaagggaaaaggaagtctaatggtctgctggaccacttaactctgaatcccctgaaggcactactgcaagtgacttggtggggatcacccttatcatcctcatcctcacttagaggcaaaatgtgaagggcctctctctctctctctctctctctctctctccctgtgtgtgtgtgtgtgtgtgtgtgtgtgtgtgtgtgtgtgtgctcatgtgaccttagaaccatatgtggtacatagtaatacttaagtattcattgttcttgctcctattatttttgggggtattctttaaaactgttttccatttcattgtgtgtcagatgttttgactatatgcaactcatgcctgcagtgcctgggaaggccagtagaggatattggatcccctggaactggagttacagatggctgtgagccatcatgtgggtgctgggaatcgaaccctggtcctcagcaagaacagcccccttttgggtgtttttgctttccccgccattgtatttctggtgttcagtggctcatttaggcagggataagtgtgacaagggacctatacggttctgtcagacttacaggccactgcttttagagctatcgaatggcaggaggtgtgctcatgggggggatggcattcccatcagtgtggatgcaaagactgcgggtgtactcagcacagactgcgtttcctagcctggttattaacactaactgtacttcgttacccagagctcaaacccactgcttgctgcttgctgggagaaaagcagagggcctggtacctgaagccattggtgcatcatgggtcctgattctgtgtctgggttttgcattctaatacatccccttccctctacgatcatcatgtttagcgcagcggatgagctgagaagtttagtgagatatacatggatatatgtcacgaactctgatttatatcaacaatctagatatatgtcactcagaaatatatcccaaactctccaaggaggtgtgcagatgcatctcaggcattgtttgaatgctttgaaaactgatcttgattatcaacttgacacacctgggaagaggagacctcaattgaaaaattggttttgttaagtcagcctgttggcatgtctggagtactttcttggttgctaattgatgagggagggcccagcccactgtgggtggtagcattcctggtcagatgggaaagatagatgggcaggcataggagcaagccaataagaaacgctcttctgtgttctctgtttatgtcccagccttggcttccttgctgataaacaagacaaacgcttgccttccctaagttgcttttggtcatgttttttatcacaacagaaacaaactcaacaaatacttagtgctttggaggcaataaattaggtgtggtgtgggaagatgaaaggtaattgattttacttgtatcccgctctcaggaacttaggccagtttggtccagaagctcaaagacccctaaaatccttagacctcttgggagacatgccacccattctttttaagaataataattctcatagactattctctgagaactaagtatcagccatccagccttggtgtattctcccagaatcatttggggacaaaagaaaagaaaatttactcaacagatgtcaaaacacggagcaactggtatggctaaatgagtgagctcactagttctgtcatctgtaacctgtctgtctgtctgtctgtctttcttgcattcatgctttcctcccttcttgtcagtgtccccctgcccccatcctccagtatttagatgactaaactcacagatggtgggtctgtgtttttatgccaactgattaaagaattgttaaggcagatttagtcctctaaaaacaaacacatgcacaatggagatttggggccaaactttgcaagacacaatagtgtattatttctttcttgaaaatgtattccaagactgacttagttataaaacagcagtgcccatcattgatgttatgatgtctgtctcctcagagtttgaagctgctgaccacattttagtaataatacttatttttttcctttctcccatcatgaccgtcatcctttgagtgattgtgttggtaaatcaagggattggatgcatgagtgagcatggtgatggcttttttttaaaccatacctgtgacttgcagctaaacagtgacagtcttgtcacaccttactatatctttgttttcttgaggggaaagggggaaccaaagtttacttgccccattattgttaaccctgtatgagtgttattcagagaaaatgcaaactgttggttttggtctcatgccagttggttccagattttgttcttaagagagtgtgtgtgtgttttatgttatcagtttgaaagaggaatgctttccaggatgaatccagccaaagataggtaaaaaaccgattgaccacccccccaaaaagaaaattacaaaacaatttttaaaaaataaggaaaaactgtttaaaaagctgagaaaatgatctaacaattcagcacaattccagtgagaatcagaactggatttgaggaagggaattacatgctgtttattaaatttatatgacaatagagaaggtgatgtaaagctataagcagttttcattgctgtggtattgtcccagactggctggcgtcagaccccatggaaggagggttggcttaccacaggtgggcattgtagacatccaagggaacaaaggtatgttcaataaagagtgcagagacatcggggaagccataccgaagagcagcaatgaaccaggtcaccacctaaaataagcacaaggaattaattccagttagactgagcacttaagagtgaaaagcagactataaacagtttaggggaaaaaagtgggaagatacttttatgaccacgtttagaagacataaaactagtgaaatgcaaaccgtgaggctgacaagtttgactgcatcggagcattagttcatccaaagagcatgtcacattgaaaacaaaccccacaaactcaaagaaagtaattaatatatgcatatataaggacagggatatatattttcttctctggatattttctttatttacatttcaaatgttatcccctttccaggcctcccctccagaaaccccctatcccatccctcctccccctgcctctatgagggtgctcctctacccacccacccacccactcctgccttcctgccctggcatacctctaaggacatatattttcatctgtgaattttatgatgttaaaataattttctctagttcttacattgtatccttttcatgaatggttattgaattcagtcaaatactagtctgtatatgttgaaatgatcatgtgattttttatctttcactctgataatatggtctattgcattgattccttttgtatattgaaccatccttacatccaaaggctaaatcctgctttgtcatgttgtgtggtctttacaatgtgctgtcgaattccatatgtgcatatgaatatttgcatatatatttattagggacattggcctgtatttctttttcttttcttgtgttttgtttgtctggctttgttatcagggtaatgctggacacaaacgagtctggaagtattccactctcttatttatttgggggaaaattggaggaagactggcattaattctttttttgaagttttgctagaagtctccaccaaagccatctggtcccaggcttttctttgttaggaggttcatagttactataaatatctttaaacctatttatacgagaattaaaatgacccacatgccactgttgaagtgtggttgacttggaactgcttatatgttgttgaccttcatctgagctggtggtgatgaactgcctttgtttctttgggaaaattctcctattgttggttggcagttttctcttttccagccttttgatcggaagctactgtcttactcccttctggtgtgcaaggtgcctgctgaaagtctcctggcagccttgcaatggctctcttggatgtgaaatgttgcctttctcttcctcctttcaaaattctcttttgtctttcagccacttgatcatattgtgtcttggtgcaaacttctttgaatttaactttcttatatctggatgtccatttcctttcactgatttgaggagttcgctgacattatttcttctaagaaagttctgcctctgtctctctgtctactggtttgtccaaccttttgaaatcacaaagcattgtcatttacaaagttcaaggtcaaggactgtacaattgaattacacaaataatctcaagaaaataataatctcgagaaaacacatgatgctttaagtaagattatagttttctgttggctgtgttcatagaagtttgggcattcctgactccttggagactcacaaatgtgtgtgcactgtgtcagttgatggcgtcccacagtgccgtaaaagtagactttttaatttttttgtgcttctcagattggataattttcaatgttctatttttgagtttgttgattcttgcttctgtttggtcaaggtcaagtctactgttgaatctatgtagtcaatattttagtttagttattatattcttcagcccaaagtttttatttgattattttcaaaatagtctctcttggttgataattttattttgttcatgtgtcattttttttcaagcatattggtgtctttgtgatggttgttcctgaatttgttagttaacttggtaattaatacatctctattgctttaaagctagtttccagagatgtatttttgatcatttgatagggctttatttctgtgtgtacatgtgtgtacgtgtgtgtgtacgtgtgtgtgtgtgtgtgtgtgtctgtgtgtgtgttgaatccttgtaaaattagctactgttcctagtttctatcgtctagtttcacacaggaaaatcttgaccagccagctcaccctgaattcccggggacatctggtgcctcttctgtagatttgtcttctccggacttgtgtttacacatctccagttcaagctgcccactaggttccctgttccagctgctctctctggtgagcttaactgcaggtcgcctggagcttcgtgacagagtagctctctttagtcaccagcagcctccagatttccagggtaaggatggtgggttctgtcaggaccctgagacaggaggacagaaactggctccccagagggatgcatgccgcagctcttccccagagggagaagtgtgactgatgcatgctgggaatttccccattggttctgctaaatctgattttgcactttccatggagtccagaagcttccttaatttgtttctggattcatcacaaaaggaaggagcgcatacattattaggtctgtgtctgtgtgggaatttgccttcttgcaagattacctcacagggagtctctacaaggttttaaatgagctaatgttcttgatgactgtccttatgagaggcataaaggcagaagatacgaagatacagaaaaggctgtgcagagtggaagcgatatgtccttaagcctagggttgtttgtgactcccagaggctaaaaaggaggcacgagactgattctccctcggagcctccagaagtagccatctttcctatgaccttgatttcacacctctggcctctaacaatgagagagtatgcagttgtgctcagtaactaagcaggctttgtggtcatttgctatagcaaccttggaaaaccagcacagcgggaaggattatagggagtttcactgttacaggctgggaggacgttatgaatctttgcttagctgccagcctaccctctctttgttcccaggagcctgcctgtgtctggggctgtcatccatgcagtttttttttttggttgagatttctatttggtggcaccaaactgtattcccgtgtcctggtggtaactgtcagtggagcgtgtgaggtgaagacttcaggaccatggcctgcctgcccatgacaactctgttttacatgtgttattttgggggcaataaggaaataaaaacaaagacaaaaaaatgcatggtcgggggctggtgagatggctcagtgggtaaaggcgctgctgtcaggccaggcagagttcaatctcacagtggagagagagagccctctcccctgaaaatgtcctctgacctccctcaaatgctgtgtgtgtcccccccccccataaatgaatgtaatgaatgctttaaaaaggttctgtcacttaaccaatcaaaaagaaaccgtcagagatctgtgttggcttctctctggccatttcttcttcctcagtcttccctgtcttgatgctcttccttggtcagtcctgtttgaggtgcagcggcttctacagtcacagtgacgctctgacactgctttggggaatgggggagaggtttggttcagagccacagtgacatgaaaacccaaagaagctccagcttttcagataaaagccccaggaaattggggctgccctctgccctgcccacgaatcttcatcattgattcttggccccttccggtgagcagcatctaatgggtcctagactggcatctcatgcctaccaatgactcctggccaagcgaggggggaaagagaagtcaggaggagtggggtgaaattactaaatacggagcaaggggaaagtgagcaggcaggaaaattattttgaaaaggttagaggaggaggcagtgcatttactaaagaaaatgccatacctgcattagagcgctataatttcccccccaagtatcgccgtagaaatcatacttcagactctccgccatgcataaatttgaggagaacaatttaccggcgctgctccctctgtgtggtcagcatcctcctagcatcagtcagcgggacgagtttcagacgttattatctgtgctgtcgagtgttcgtttctgtgcactgatttggctgccaaaatgttcccttttcaagccacggacatcattaagtccactttttattttacatcacttatcacttcccagactctcttatttcattactttgcattcagaatttcaggcagaaatcaatagcctggacacaaaggcaggcccctgcactctctgtttggcactgacaattcatttctcaaatcaaagggtttcttttttttttctctctctctagaagtccagtgtgggaagtagctagtatgcctatgaagtcttaatttgcttgagggaaagatgaatttttaaaaagtgggtgtggggctaagcatggtagctcttgtctgccatcttcacatttgatagaggcaggaggaccaggaattcgagcccagtagtctgggttacacagggagaccctgctttaaaacaaaacaagacaagcaaaaatgtgtgtgcatgcgcacacacccatgcttgtcctgtgagggtttccgggtatgcctcagttggtaaagtacctgctttaccaacaacaggtacaaggacccacgtttgatctccagagctcatatgaaacgccagtcgtggtggcatgtactttcgatcccagccctgagaaggaagagataaataggtccctggggttcactggccagcctgctaccgtaattgggagctgcaggccaaggagagagtctgcctcaaaggaactggttggcattcctgagcatgacatcctaggtggtccactaccctcgtcacacatatgtacgcatgcacacacacacgcatgcgcacacgtgcatacaaacaaacaaacaaaaaaataactctttactaaagaggctgtcttctgttctctgtctttcatacactgcaggcagtgcctttctcatcctgtctgtcttctccaaagaaggacacttgtttctgggtccagggtgccctgaaaaccaaccaagccacaactccgccagtcttgctgtgcagcacttagaaacggagcttgttttcctgttttcacgcctctaagatcgataatcgctgctctctgctttgctagatgaaataccaagtaactgtctcgagatgtagctgggtgaggggacggtgaaagaatagatctcggcggctgcgcactgagcccaccacacccaggctcccctgacttagctccgtgctgggactgcgcagcatttccagacaagttagtcccaagcaagggagatgggaaagagtcagtgtgctgccgctgaccatgtgggtggaactctgcgggggtggggggataagaagccccgggcaatcctgcaaagacttgccaaagcctgggagagaagggctcttcttcttgttcccttgtttcagatttttcagagaacagagtgattagtaccctggagtacactcggcacactcgagggttagtgctggatgctttagcccacacctaggaacgatggcagcacaggtcctcaccgactgctgagcagcctcgttgtctgcccaaccctcagacccccatttgcgtacctggaccgatgctttcccaactaccactgaccagtcctgccgtgagcatctcttctttcctccgcactccctaggagaaggggagacctgcctgacaaacttgctggtgtggtgaactcggtgatgtcttgctgcagatagtttaatgcctgtgtagtctttctctctcctctccttctttcccttccccctttcctgtatctcttcttccgtcccccatccttcatggcttgtcttgtgtgtgagctctggatttagttgagagacctcatgccagtgaatagctgtagagtatttgaggaagacgccaggtatcagccttgggccttcacacacacacacacacacacacacacacacacacacacacacacacacctcaaatatgcaaacatacacacacatgttcgacacatacagacatatgccaaacatagacccctagtttataccaggagctggcagaaggcatatttattttccaagcctttctacaacattgttaaaagtttataaacttttcagaacctgtctgaaactggagaaatctatttggccctagaacaattttgcttccatgatgactgcagttttagtacattttattttttaaaagcctgagaatcatatatgattgatttttgtgtacttgctactttcttctagttgctgaattttcacgcaaagcagaatttaaatgtcataaaacttgtgtgtatttgcacagcagcttagttatagctagtgtttcatagtttacacgaatatgcttcctttttctctcaaattatggggacttagctgaattttcaagactgattaagaggttttgtgacctgctctatgggggactgatgtgtaatggtaatgttaatttttttcttaattttaaaatccatttgtctttgtgtgtaagcacacctgcatgtgtgcatgtgtgtgtgtgtatgtggtgtgtgtgatgacatgtatgtggaaatcaggggacagcccatgggatcttgttctctcctaacatgtgattcacagggatccaactcaggttgtatgcttgccggcaggtgcctttgcccactgagccaatgtactgaccctggtgttgcccattaaggacttttgtgtgtgtttgtgatgggaacaaaaaaagtgggtggggggccagggagaagaccctggggaagatggggggggtgagaaatagcccacgttcagccagagttcctgtgctctgggcaggtggacgtggggagagctgccggatactttccacttggctccgggtaggcatctaagcctctgaccccactcggcgggaggtggacaaagggcagcccctgacctgggggccccagggccacaccctgtagccctggcattataggagagagggatgagggaagaggttcccaacactggcgagagtggtgcagcagatcttgaaggagcagagactctctgtggtttaagagctttattatagaaatgcagggagaaagagagatggtagaaaggagagagagagagagagagagagagagagagagagagagaaggctagagagaaagagagaaagagggagagaggagaagaggaaagagaaagggaaggggagagagaagtgagaggtaagaagtaagagcgtaagagagcgaggtgggggctgaacacccctttttatggtcttcactgttgctaggtaattggggagaagtttagcctgaaggtcagaagcttgggccattgcttacatgattactgaccatgcttctcttgtgggggctgtgggaggtgataacttaggcaggggctagagttccaggagcatgagggaacgcctactgtgtcatgtatgtgaattatgaccaccgggttcagacctcagctcgactggagaccagcctacaattccccatatgtttggattcacacaaatgtgtatatgccttgtgtgggcgtggtggttggggggagatgacaaccactggtgacattccttaggcactgtccacctatggtttggcctgggacttgtccatctgaatttggccagactggcatttccatctccatgctactgggattacaagcacaagtctccttgcctgatgttttgtgtgagttttgaggattgagtgctcaagttgcttatctgacaagcattttgctgactgatccatctccccagtccgcttaagtacctttatctaggggtatctgaggctcttttctatgccaacgtgtgtcccagagagaaagaaatcccagcttcagtggtaacctgggacttcattgtgacatcccattctttccatccccagccctgtttctcattgaattctgggttatggtaattatccaatcacgatatttcaggtaaaaagataatgaatgagcaaagaaagacatagctagaaaatccgttgacagagtcaaccttcctgacccaaattgactccttatattgaatgttcccttcaccgctgtctacttggtggcaaatattcctgaaagggactttcatattttctagagattcatgtgttctctctactatcttcccacccgaagccataatatcccattccgagtgtcataaccattttcatagcaactatgtgtgatttcatgggcagcagattgcagggagagagcagtgtgagaagtccaaccccttgggacagggactggctctcttctaatctgcttagcagtcaacaggacatggggaaatggacaacctaagagggttgaggacgatctagcatcatttaatgacctgttctcagtgcccctagaatataaatttaattgggatttatttatagctgacactgaagaacactaaagccattttcctcggaaaagggagtgcccaagaataatgtataggaatatgtatagaagagaactgggattgggctcatggaatatatagtctttccttacagtgtgtgtgtgtgtgtgtgtgtgtgtgtgagagagagagagagagagagagagagacagagacagagacagagagatagaaagggagagatacagagagagagacagatagacacacacacacacacagaggacctatagaactatcacattatagataacagggttctgaacacatttattttagatgtgtgatttctggtttctgaatgtttcagagagaaaactatcaaaacagagaattacatttataacttccctaaaatcggtggcagccacagaggctagagagatggcttgggggttaagaacatgtgctgctgttctggaggacttgggttccatttccaacccccatattgtgactcacacatgtctgtaactccagtctcagggatccaatgccctcttctgccctcttctttgccagatacacatgtggcacacgtgcatttatggagacaaagcactcatacataaaacaaaaataaataaattaaaaaaattggcagcaaaaagagcagcccaaaggctttggatccttgccaagagactcatactgtccgtgcaaccttaatactcaggtttcgatgaactgttattaaagaagggagtttttatgggagagggaaaaaaagttaatccaaatagttcaacaagtctttttcataactcctgcatgtatcacactggcaaatgacacagcaggctccaacagtacttgcttcctgctgagatgagaaccaccttgtctgtgggacctgaggcttgatcagagacattccccataggctcctgtatgggatgggggatgcttaaacttcagctagtgccctgttgtggatatctatggaaccttcaggtggtggtgtctagctggctgaagcagactattgggttggggggacgactttggaggctttaaccccaggaccctggtttatgctttgctgtggccttgcccacactctcctcctgccatggactgagcccctccacctgctcttcccactgcaataggctgactctctgaaacacgaaccaaagtaaagcttccctctctgaaatagtttccataggattttaccttcttagtgatgtgaaagtagcaaatgccctgacttagagatagagggactagtgtccttggatccagcaactgtcagaaaataagggctttcttctaagtcactggctactaattgatcaagtcagcctctttcagatggtgtaatgagattggatattttcccttgagtctcagatgcagttataggatgagcttagaaaacatcttctgtccctggagtagaagactatcattgaagaaattactggcaagttataggaataaaaaaaaaaaaaaaaaaaaaaaaaaagctcagtagaaccctctattaccctcgtcaatgattattattattattgtgatttttctacttagcaagtgtatgggcttgaaaaaaaatccaataaacatttattagtagctcctctttgcctgatagcagaaaattagaaggaaccagatgcacccactttaattaattggtgtaatcaggagtggtatgcagcatcaagggtgaaaattgctaacttcaattgtggctttgtggctcaaatgagtttctgtagtcttgaagtctttgttccccttgaataacctcatagggagtgtccctgtttccctttcccacccatgggatctctctctctctccctctccctctccctctccctctccctctccctctccctctctctctctctctctctctctctctctctttctctccctctctctctctctctctctctccctctccctctctctctctctctctctctctctctctctctccccctccccttgttgctgttgctgttttaaggagggcagtattcagttaaactcttgtatggaagataggctccaaattggcagtttctctgcaggagtgtgggggttcattccttgggattttcttagtttatctgaaagaacagcaaagaccagaggaacagccagagatgtgatggggaaagtgagtgctggtctcttgtatacagcaagcagtgtggacatgtcagttacaaccctctgcctagacaaactgcctcctggggttcctaaatgtcacatcctttctctgagaatccttcccaaactgcactggggaccctcgttcctctaactcccttaggccatcttaccccgccttagtactttagattctctgttagaactgcctatgtgtttgctacatcgtcctatacttggacacagggactgtatcttgttctttttatatctccagcctacaatttggagcccagctaggcttagtgagaccttgcatcagtgagtaagtgaatggctgggagtagtgagtcttgttagatggtgggtttctgcttacctggtgtatcagctagctattgctgcataacaaatactccagtacttccttaatgtatcagctatttagtcatgcttcggcttcacagttctactgatttcagcctcatcagcttctagggcagtagagggataaagtgaactaacttggcctcaactggatggtctctcatacttttcatgtggtatgtatttttaatcttccagaaggctagcctggacttgtagatgtgtcagaagcagggtttccaaaacccaagcagaagtatgcatgcatggtctcttgtggcccaagctcacaacagtcccagtacagggacaagtggggaggctgacacagttctacaagctatcatttgggcagcttgcaagtgcacaggagcatttgagttgtttgaaaacaacaaacatcacagttagccagaaacccaaaatccctttcaaagaaggtaaacacgatgtcgttcagatcgggatgggccccgagtctctttctccagagatgaatgaagacttgtgaaaggatttttagaccaagaagagaagtaagctgatttccttaaagactctggattgtggagacaatagattccgaggttgtgtgagaccagatgggaaacccccttcagtctccaccattagaacccaactcctagcaggtgtgagggagaaactataccatctagcagattcacactaaagtgtcagtgctgctttggtgacatttgttcagagagaccatcaatgtgtcccatcagggcctgagagcactttgggcctgggggttccagggtgcccaggacaaaggggaggggagagaccatcactatcagctgcctggggacatctcaccttctgaactgggaggtcctgctggggaagggtctcatgctgtgttgttgctaaggtcccagacaggctttgggcgtggttctctcaggtggggaggctctggttccttctggggccacttgctacagcttctgcctcacccacccaatcccctgcaatggatattgctttcaaaatggggtgcctcgtgttcagagtactatctggcttcaagattctatctgtcttcggctactgggactgtcttttaagggttatttttcaagctttgctttggaagtgactgaggaatcgtttatggagacaaccaatcagtgtctacaaagctgttttcctccctgctccccaccctcaattctcagagtcacagaggcagtgtggtccttggccagcttcttcctaatgtaaaattcacagccctttctggccaacagttcattcacatagcgggctaagcatacccagacactggctggctccagaaatttcaacatccggggttccttgaaagcctgggtctgcttatcagtagtgttcaatattaggttacttgcagaatggagtcattatcttcaatgtttaataactgtgccaccaacataatataatcaaatctaagaaatgtaatttagaaaggctttggactcaagccttttatgagagtgtttttaatcttttatgatcttgtccctaaggctgagaaaaatcttgttttctctctatcttctacttgatttgtctcctttattttgctgctgattttcttggccaggtccagattgaccagtttcactggtaccaaaatgtggggagctgacatgtttgggctgaattgtaggagcgagaggtcagagtggcagctgggtgctgtggggctggagtcttgcacagtgaaggcttgttttagtaaggagaacagggacttgtgtgaactgtttgctcttgacttaaatgaacaaagactccaggatggatgttcaaccctggcagcgtccattttgtccagatggaagtcagcctgcagtaggtaactcctttgtaagggatggggagttcagggaagagcttggcagtgcagagaagcccccacctacagtttcctgcttaggaaatttcgtgtagtgcagtagtccagtccttttgatttgtattcttagaagaagcagtcagatgaataagtctttgactttttgtgatcgaactctgatttcccttgggcagaatccctttgagaaataaggcagttagaatgttttgagttcttcctttcaggaacatagaccataatggtggccctgttttgtatcctgaggggctgtggacaggaagtctacggcaaggttcataaaacacttggagttttcttggagaaaggagccatagaaatggaaggcgtttgtctgtgttagaaacctcccacagagtctccaggctctcatgtcaacccaggtcataaagggaaaagatctgttacaagtcccctcccctcccttctccccctctgtctgttactcaggggagaaccaaagcaccagggcctatccccgagactcctttcagcacacacaccatcttgcttgctctctttgaaggcacaaggtagcttccccctctgaattctgcggtgactccttcttgtgtttgatgactttatccgatgacttgcccacccacattgggagtagggagaagagacttggagagctgaagtcatgaagggttgaactttagaaagaaatgttggtagtgatgctgggtatatgtttcttagaggcatgagtttttgtgatatttttgtaagcttggtcttatttccttcaaattgtggaggaagatggacgagagtgggagcccaaagtagaatgaaaatattgaagtgtagatgtgttaaaacctttggtttagagtggaaaccacccctttccagatatcaactacaacatcatatgttctagggagatgtctatacacaccattggttttaacattttaactctgaattaattggacgcttaaaacaaatggttgattcggccagcttcttaattgagttttaacaaaaccaagccaactactgcttgaatcaactggccatttgtgtgctaaaggcccaggcaggggcaatgaagtcaaacgacttagtgataaaccttatggtcaggctgaaggaagaccttagacttctccatggctccccaaagagcgaaagaagtcactggcgtcccctccaagtctcagctcccactttcaatgatattctccatccatgttgaaaaacacatgaaagacaatgcctttggactccatagtgaccctgtagcaggggatggcggagggacccctccccccattgatgtgaacattagacatgaccctattcagtgttttgtttgtttgtttgttttattgtttgtggaaacactgtttttctgtgactttaaattgtaaaagaatattttccgtaagcatatttattcatgacgtttttgtatttcttttgtgtgtggtgtatgttttctctttctaccacgtgagtcccaggggatcaaactcaggtcatcaggcttgcggcaagatggctttacctgcagaaccgcctggccagtcatctctaagtatagtcaggaagacagtttcatctagtttgcatttgagaaactattttccatttcactatgagagtacattgactggcccggtggcctcagcaacatagaacatgttggattctcctgggatagctttgtctaagactaaacatctgggagaacttccatgatcctctgtgacgcatctatgtagccatgtctagcatgatattcacccccaggcggtgtccaagtgctcagggtctggcttttactggcctaagacatgtgcattgatttcttgggttgggctctgcttgctggtcctacctatctacagcttgggaaaagaaccttctgtgtcctggctatcagctatgtcatcatgctccccaccactccctgccctggactgggaaactgtgctaaagtccagagaagcaggggcccctggccatgtatatattatataagatgttccaggggccagggactcatatcccattcacatgcattcttcttcataaatcctgtgttaaagggttatttctacagtgaacacattttacatgtttaatgggggtgattaggtgtgtagtatgggtctgtggaggtcagaaggcaggatcaggtgtcctcctcagtcactggaaacaagagtcctcaactggactagagctcacagataaaactaggctgaccagccagcgagtctgaggctctgcctgtgccaggagtacaggtgtgtcccaccactgtgttcattggtcttttctgtggtgttgggggatccaaactaaggtcgcatgcttactcagtatgcacgttaccacactcagtatgcatgtaaccacacgagagctccccacacctctgatgttgatgcatttcattaacaacttccaaacctacaacatgacagagccttttgtacattgtcggcaggcagaccctctcaggggtgcaatgtggagtctgagtcaccagcacaagggctcgtggctggaagtgggtttgtgctctgtaatgtgtgggtcccagggattttcaatgtccctggaacatttcaacagcagaacctgtgctttctggttatgaatgccgttatgtcggggacaaagcacttgtttagcacaggcagccttgcttttcctggcctagcttccagcttccatgttgccttttttaggagcttacctaaagaagattcttgtgtagaattccatcccaaggagctcaataaagattcagcaaatattatttttatggcctgtgtgcatgtttactttatagttactctgcacatgacatgcaaatgttgtatagtggtctcatgcatgatttatcttcttagaaacttcagccatgcttggctgggcagaggtagtgcacacctttaatcctagcactcaggaggaagaggcaggcagatctctgtgaatttgagtccagcctggttttacgaagtgagttcaaggacagccaaggctacccaaagaaatcatctcacacacacacaaaacaaacaaacaaacaaacaagaaacttcagcttagcatgtattccttttatgtgtgtacaaggaagcacacacctggcttacacgattcttgatatttccatttgaaagaaaatgaaataagttcagagagacagaatgacatcatcaaagtcacaagagcagctatgaagccaagacaggatttgagttcttgccttctgacttcatgttcactcttcctttgtgttatgttatgttatgttatgttatgttatgttatgttatgttatgctatgctatgttatgataggcctggtgttgcgttaggatgacaagcacgtatcttgccagcagcatgcattattagtctttctaccgccatgcactgcctttttcgctggctgataaaataggtgttgctttcaaaaattatacccaccaagacgatagcagcagtagtaacacatcttaacatgagatcttttgaacagccatgggataatttgaattagaagaattttactcccaagttactcctttatcagacattatgaatccctgccctgtggcactgccgccccccttagtgagaatggtacagggttaagtgaggttgtggttcctgctattcctgaactcatagccccatggctgggaggtgggacagccaccactggggcggatgtgtggtgaactgggaacattagtgccaaaaacgtccatcttaacttcatttactacgtaaaaactggtctctgtaatccatcgtcaggtaaatggttaaatggcatgcactaggtacatacaaaggaccatcactcagtgtttttaattctgacacccgcggtatggatgaaccttgaagaccttggtcaaacaagccagacacaaaagagtaaacaccacatgattccacttagaagagagactcgtttgtagagctagagtctggaataggggtcctggggttgggaagtggagggtgagcggttagtgttcactgtgggacgtttcaagttgggaagacaaaaatgtttgccgtggttcttggtggtggttaaagagcattaaccatacgagcactactaaactgtgtcatccaaaatggtgatgttggcaaatgttattgtatgtatctgtctcacgtatccacattagtctatagaatagaacattgtcagctgtgcctataaaaaccgagtgcatagaaatgctcacaagcacacagtccttggaaagcagaggacagccccatggtaccgactggggttagagccagaggcagttgggactgcacaggtgtcctgtgtccttccagttgcttccttccccagtgctcgctgctcagaggagtcctggtgatggtgaataccgtccaggaccgggtgactttttcacagttgattggtagggagaatcactgttgtctcggagaaatgagaacatgcacactggaaggctgcccctgcttaacgctcctctccatccagcaggccagatggcgttttatgtggttttcacaactgtgactctggattgcttaggaaacctgtttctccccagctcctgcctcgcctgcctttgagcttagctttcatgcccgtggcaccgtgtgaatggtcacagtgtccccttcctttcccttttatttctgcagcaaagcctaccccatcatctttagccttaataactgccccacactagcataggaaagcctgtttttttttttttttttggttgttgttgttgtttttttcagggctggtcctatgagtggtgatccttatgttcagttctgatttcccccctgagttaggatcctccactcgatgccgctcaataggagcagttctgttgctacactggctttgcctcctccgtctggcatcctaccatcagatcaaactttcataaggagtcaagtcaaatttatgtgtaattcaagaagaacttcactaggaaggcagtaatgaaaagaaatatagatcaacttataaaaggattttcaaaatgctctttatataaaaaaaatcttttaggggttggaagatacttagtaaagtacttgcagggtgagcatgaagaccccagttgaattcccagcacccatgggggcagaggggaagctgggttgtgccgtgcatgcttgtaatgccattgttggagagaaaggcaggccgctggctatccagagtagccttattcatgagctccaggttcagtgagaccttgtctcaaaatataaggtggacggagattgacaaagattcctaatactgacttatgacttccacatgcatgtttacatacatggatctgaacacacacacaggcgcgcgcgctttcactttcagaaaaaaaatgttttaagaggatcttatgtattccaggctgaccttgaacttgctaggtagttgagctgaccttgaacccctcatccttctgctccaatgcctgagtgctgggatatcagtttgtgcctccattctttttatgcaatgctggggaccaaacccagggctttctacatgttggggatgaactacatcaactgagctatatccctgccctctctcagtctttgcagcagttctgtgcgggaactgaatagctatgtcatgggagaaagagaggtcagagaagttaagtgatgagggcaaggctgcctaacagacatcggataaagccagatctgaggctgtaccttctggatccacatccagaacacttattatcaccccaatatgcctctggaaaaagacagttccatctagtgaggacagtttctgcattacccatctctttgagtggcacatgaagacattgtccttccctagatacatcacagtgaccatttagactttataagactcccttatatattcgttctttagtaacaagggtctgtatgtggtcctatgtgtgtgtgtgtgtatgtgtacattcacacatatgtgggtgtgtgtgcatgtatgggggtacatgtgtacatgcgtggatatatgtgcatgtggagatcaatatcagacattattctttaggtaccatccacctcttctttttgatcttttaatttaattacttttatatgtctgagagttttacctacaagcatgtgtgtatgtatgtgcatcacatgtaagcctggtacagagcaagtaagaagagagtgtcagatccccctttgactgaagttacagatggttgtgagccaccacgtaggtgctgggaactgagcctgagccctctgcaagagcagccagtactcttatgtgctgtctggtcccccactttgtcttgttttgtttgaggaagagtctctcagcctgggactgctgattagactaggctggctggccagtgagccttcggctctgctgtttgccttctggccctggcattactagtgagaaccactgtgcgggttccccatgggtgggtctagggattgacctctggcacagaagcacttttctgtctatgctgtccatgtggtatatgtggtccattttaatgacctgacaaagtgaggcagagatgtgaggagagactgagtggatttggtcttgaagtgcttgtttatctgctgtgacccttacaactgtggtcctcactgttccagcagggatcatgggatcgtggaagacagcagatgttacgaaggacacttctgtgatggcccccagagacttgcagaagattgggtgacagtgtgttgtcctgcagtgctagacttctggcctggctcatgaatggctgtgtctacttaccttcctatttctgcagctttcctcattgttcaccaccacaggagctgctgcgtggactttggaagaccttctctttggtgcagcttcatttgctgaagacttcagacctaactttccctatttctacacccctagctttctttctttttatatttggtggtgtatgcatgcaggaatgatgaatttgtgtgctgtgtgagcatgtggtgtaagggtgtgcttatctgtgctagtgtacaggcagcggaggacactgagtgccctgctcccttctctgctctattcccttgagtcagggtctctcattgaactcgctgaagtcctaggctggtgaccagcatgccccagtgagcctcctgtctgcctgcccctcagggctggggttatagggcactaggtcatacccagtgttttctatgtgtcctggcatccaaactcagattgtcttgtttgcccagcaagaacccttacccagggaggcatctctctccagcctgttcacctacctttcaaagaggctttcctggctttcagggtcctctgccaggcatctatcagccttccattggtagagatgccccaaacctagatcatattggcctatccacagggatgactgagttgtggcctctctccatgttcctctaggctgctcgttgctgcccattctgcagtgtatgcagagtggagggtggctcccagctgctctgggtttttgcaatgatctgtcctggagccgagcttcagcatggatcattctgtttcctgtcggaatcaattttctgtccaactctcatttcctattgtgtgttcctctggggtcagcacagctttgtcagacaaaagcggggctttctctcttggagatggtcccggcttctcttcagctgtgtatttgtctaagcaacagccgggcacacagtgtgtgaccacccagctgctttggctgtccttcctggttgtgcttcagggtttaatcttcagggtttagtctttggatgtgggctggatggaatccttaccctgtatcttaacctgtaggctctcttctgccctgacagcatctgagcgttcttcagcagaggtgaaacattacatcaccgatattgtcaccattgtttactgctcagatgaatttggcagaagactcaacagtctgtgtgtgaaccacagcactgaatcagattgcagagaaattcttatctgttctctgccttccattgtctgattttttacctataaacattacaacgtaacctccacacctttccacaccactgtgctgctctgaacacagacaccaaggagagtcaccccactcattgtaacccaagtgtccttggggtccacctatgtcaacctctgaggatttcccaggataacaggaaattttattatttctttcagaacacggaggactaatgtgacaatagagatgggacacggtcattacaggatgaaaaatatgatgggataagccaggacattctgtgacctagactcatatcttctaacacgctggatgaccttgcgcaagctttactctgatagccctgaatttccttaactgcagaaactgccctgacaactcagtatatcaacttccatccacttataggatcttagcagaatttatctggatgttttgattgtttgcctctggataattcttgcttgcctacccaaagaatggccattgagtcaggtaaaggtactgggaagagggtgtggcattcagtaagatggaggcgagaagaaacttctctcacagagaaagcattaatacagtggagctactggcatttgagccatgctggaccctctgccctctttaccaagtttctaggcatttaaaattgtcacatgctcccgaagcatgacaccatagggagcatgacccggtgggggtcctcagacaggtacagtcccttcccctagcaaatatgacacttttccagtcaatggctgctagaaagttctccaactctgctgcctcccacttcacatgaggatccccgaggggtggggaagctagcagggccacacggtcacctttcagggagcacaaacaaggagtctttcgttctagggatgaaggaaccacgcaggggcgttgcatgttttcctgatgctgtaattccatctctggtgcagtgctgacatattctagttcaaagcagctaagggaggaaggggttccgattccaagctagagctcatcactgaggggaagttgaggcagggactcaggcagccggccggtcacagcacctccacagtcaagagcagagagaaacaaggtgtagaagttaggtcctggttcttcttcccagccccatgctcccagaactaagactcagattcaaaataagtttacaaataccttggctatataactgggctcttctatgactagatcaaaatgtattgtaacccatttattctaatctaggttctaccatgtcgccggttacctgtgtctctcgccacatcctcccaggagaatctcctgcacctggctctagcctagaatcctttctgcctcccggatgtcccacctcctattctaccctttcctataggctataggtatttttagttgacaggcaatgcatccatacaatacacaagataattctttcctatacaacacatccatgttccctacctgctcattagactcagctaacatccttcattcttaaaccgttcaggaccagcccatgaaactctgctacctgtattcaggaaagtagggtggtttcccacctcaattaacaatagagacatttcccccaaagtattcctacaggcctacctgatctagataatttctcaggggagactctcttgtgtaaagttggtagttaaaacaaaacccagcacaactgctctttgagtgagcataccagctaacgagtctgatgtgatttcagtttcataagagtaaagtgttcacacgcttccactggagggctctgaccacagaggccggaaacacccaagggcacccctctcctctccagccagcccagtgctcaacgagaccagagaagggcttgatggccattggcagaaatttctgtaaatttcctttatgtgtggattggaagatgatatttttattcaggaaggcatgtctgacccaatgatagaaaatggaattgatgccattttttagattcaaccctgtctctaatgtctattcttctgtttggttctgggcaccccttagctccctgctttttcaagaactttgcttagcctgactcttcagaagctcacagacaagtaaagcctaaataagacccaggtatccctgaaaggcacttattgtgggcctagctctccatccactgtccagttttctttttcagtttttcgtgtttgtgtgtgtgtgtgtctgtctgtctgtctgagtgatggcatgtatgcatgtttgtgcactacacacacacacacacacacacacacacacacacacacacacaggtgtacatgtatgtgagtgtgtgaatagttctgaggtttctatctggaatcttgctcatttgctttacaccttattcattgagtcagggtctctccatggaacccagagttttctgacatggctagtcttgcttgctagcttgctctagggatcccctgtctcagcctgctgttaggattaaaggtaggctgccacacccacccagcatttatgtgggttctggggattccaaactcatcctcaagattgctgtgtgcacagaaaacgtttgcactgccccgctccccacctcagtgtctaacattttgaaagtaaaatcacatttgccacacccgctcttatcatgagcagttgcttgaggctgccttgcccaaggtggctgacaacttactggttatcaagcgaaccacaagttaataagctcttttgtgagacttcaggagtgtttaaaaaccaaaccaaaccaaaccaaacaaacaaacaacacatcttagtactgtgggttctatttctactctgtgaagacttctttctttggctgtccttcatagtgtcatggtgaaacggtacagtcgtgtgtgcacttagaactgctctcatggataccctatgaattataaatgctaactgctgctgtttcctgggacagggtgttttctttctcatgtttactcccctgtcctctttcctgttggttttattctttcctttccttaaacacagacatctctcacgcttctctttcatcttcctctactcttaaattgcgcctgctgtggcttagctggtcagcagatctatagacgcggcttctgagcctctctccagcatgggagcacaggagcatgggagcacgggagcacaggccactgccagggcatgggggacatttgctttaagttcacacgtctatacctttcctccgagttacaaagaagaattgtacaattgcccttggttttacaccctgcttctctttcctcctcccccctgcctcctgtcaggtggctttggagtgattatgagcatttttgacttcctattaagtagaagttctgggttgaggagcatatagcttcctttcatggagtgcatacatgtagatctcagctgttcctgtggcttaaatgctcctcaggccctgtgcagaatggcctcctcctgattactaagccagctcctccagaagggtggcaggcatctcactacattacaaacatgtccccaatggaaagctaacccagaagtctatccactgttgagtagttgaacaaaatgtggcacgcattggaatattattggcaataaaaggaaattaagtatgcattcattcataaaatgtgtgctaagcgtgggaagccaggcacaaaggagtggacttatgattccagttgtatagaatctagaggtggcccatctatagctgctaagtagattggtagtcaagaggcaggtttgggaacagcggactcacggatctggagttatttgtagggaaaatgtagtgctttattgacgatggtgtgcagccctataaatatactcaaaagtataaaattatacaagttaggtggctaacttgtactgatgtaaattccatctcaattaaggttttacagtgtggaatagagtgagtctgcactctaaaattctacttgttgcctctggaatacaagacaaagagccccactgtctcttcccatgtcttccgtgggtcttcgtcaaccttgtgcatcacttggatgtcacatcttgatgccacgggttcatcttctccctccagacaggagctgcccttgcatggactgcagtgtggtgtctttatctctgtttttattgtttcttttcctctgtgtgggattgaggtcacgtcaaggcaaggaagcatgcatggctgtgtgagcatcccacatgagcacctggcctagcctacctcatgaggacacaataagtttctgtcacctgacaggacggctggactggattgaatttgggatgatccgaagcaccacactaccttttacctgcctccttcactggggtcatcagaaagcaattaaggagcaatgtataaagacatttcttttaaactcttgaaaccgcacagggtattatcatttgtaaccgtggaaactattcaaattagtgtcaattaactcctggcagcacccttcagattccttatctttgacattagtttgtcaggatgaggtaatgtgctttttctaggcaccgttgcctttgaagagattggcggtgtttcctggttgtaaacaaaactgtcgtacatgggcccatgacagagggatgaggaggccagaagtctgtgcaaacacttgaacccctgtcagccatgaggagctgcgatctggccaggaaattagcttcccactctgcgcccctgcagctctgccagtgaacagggccagagaagccgagacacgggtgttgggcccctgaaatctaatttggttcaggacaaagttgatcttctctagaaatctttgcttcaagatgaattttttttctttaattacaaaaatatgtgagatttttacatatgagtactgtattgttctcctgccctccctccaattactcctgtgtttccaactctgttcaatttcatggctcccattctttaatgttgttttatctgtatgtgtatatatttatacatgcagcctgctgaagtcatttagtgctgttcatatgtgttcagatatggcctcttagcatctgctgaccatccaccagggtgctcatccccaggacagcctggttcttcctctctcagccatcattactttcctccttctaggaataaaggcgtgtgagaatcctcccatccactctggcttgccagttgctgtgtccttgccagttgctgtgtccttgctaacgttttgttttggcgaacatctgcggagattccctaggtgaagcttccacgttgtacgtaaaagacctcgtcttgcagccgatgtccatcttggtcctctcgctctcagtctttctgcctgcattctgcatgttccgtgagtcccgggtgtagggctcatgctatagatgtgtcagttggggctgggcaccccatggtcaggtgttctctctattttgactggctgtgactttctgtaatgttctcttgttcactgctgctcgtactggagaactagaaaagccgcactcatctttgggaataaggataagtctttagaatgcagttagaaattatcctggtctcgggaggtggcagtagtaggttctcttgaattctttaagtaagcatattaataagattaaaaatatttagccatacggaaatgtagggaatgatgtaaacaccacacccacttcccacatcaaacaaatgctgcctttccccaactgttttggactcccttccttccttctttccttccttcctccctccctccctccctccctccctccctccctccctcccttctctccatctaaacatcccaaaagcagggtattgaaccacctccttcctctagacccaccctatgtctcacccctgcttctgttaacttcttccagacatctctatctgcttagtctgtgagctgagctctgaggcaggcgctgacacgggtctgagtgtgggctgctcttcagaacctcccatctgacttgcctgtgttgttcagggtctaccccgaagcccatagcacagaagtctccacctagtctacttagatcaacccctgggctagggaagtgatgtagacttggtagattgcttgtccccaaattcctggcattctgggaaggaagaaggctctgtggtctccttgaaatatatggaatgtatttccatatggaaatttgaaattccaatatggaaagttccaatatagaatcttgaccaacacagtggtcaaatgttttatttacaaataaacttacctcatcaaaatgtaaacctgtgtgtgtatgtgtgtgcatgtgcacatatatgtataaatgtccaaaaaggccaggagagggtgttggattccttggagctagattataggaggttgtaagacactgcgtttgggtgttaggaacggaactccaattctctgctgtaagacagtgtgtactctgacctgctgggccatctctcccattcaaacacctccttctccttacctgtgtaatctggcctattagttttggttttcaggagaactctaacacaaaaacactatttgggttcgaagactttctaatcgttgcctttgagagatgggaggcattggtaggactcttaacccattagccttaagtaatcctaatgtatcaatgagcgatgggaggcgttggtaggactcttaacccattagccttaagtaatcctaatatatcaatggtcatattcactttacacatagtagttcacttaaaccttataacgatattctaagggaagttagtggccagcattgtttaaggtctcatagttagaaaatgatgtaatgttttcaagacccagatctgaataaagcaggccatcctctgagtcttattgtgaagaaatagggcagggatccatctcgggagataatccagacgtagctttcttttgtaccaaagacttctctctctttctctctgattaggtggggggaggggtgtatggggagcctgacagacatgtgtgaggcagaggctgtttatatatcacatgcagtctgtggctgacccaaagagatggggagcaagctcacaggaaagagactatctgcaggagcctctgagatgtgtgggaatccatgcccgggggaaactgcccgcggcgcggctgcaaatgaactgttcatttcccacagcctcttgcaatttaccagtcattctcccagcgtcacgcaaagctgcgaggatcagaacaggaaggactgaagccccggttgtttgacgctcctccggctttcctcacggcacctgcgtttctcaccagttccatatgcacctcaggaatttctgctgtgcggttgtctaaataccagcatgcagccagaaagggagaggagagctggggtcctgaggcatgcaggcattctcagagagcacatgggaagccaagagctagactggctttgcagccacgtgtagcttttcttaccaccaccccaccttttctatatgtaccccacttccctcagtccagcctcagctcagcaggtgcttgcgtgacgtggagtggccctcagagggtctggaggttctcatgatgagaatgcaaaaatgtgtgcttactaaagccatgggtgctgtttaggctggtgccccttgtggcatcctcccctcccccttaaccatttcccaaacaactctttgtgggtgcccatctcgcctgctatattggagaatcaccctaacgcagaatcaaccaagctggattgacattgagttacagatagattacatttggattgaaagtctcctagggaggttataatttggtccacctccatagagcctagtatctgatgaatagcaggccggcctgagggcaggacggggctatggggaagagtaggcgctggaaccttagaatccatccaaccactccctgggctgttgcttcctgccaggtaagtattgcttaggtacccagtctaggattaaagcgacaagacagaactcgtaccaaggatgcaactgatggcccatgtcagctggttggagttaaaaaatatattttaatttgcttagctctctggggaaattatctgaacctgcatgtgctaatcaactttcacaggcgctttcaaggaacccaaaacgagtcaagcaacaaaatgagatttttaatctacataaatacagaaatcttttgccccccccctttaagaaggagattaaaaaaaattctaattcattcttccctcctgtctccaggactctgccattagcagctattggaaaatgatcatagctttcaaatctttcacaggttcccccctttttgtgtaattttctatcagaaggtcgggggctgtggcaaatatcacacacacacacacacacacacacacacacacagagagagagagagagagagagagagagagagagagagagagagagagggagagagaccctttagaggagaaagcaggtcttgcaggattgatggatttgttcaagttccagtgcctgaggggttgcagtcaccactaggacccactgtctacccttcgctgcctcagtgatagtagggtggtcagcattaacataggatccataaggagtgaagttcaaggtcagatagatttttgttgccacctctccattcagccaggataagccaggttcaattatggcaggtcgtttatgccaggtccgcaggggtccccgtgtatgcaaggcaagtgctctagctttggtgcatgtgtgtatgaatgcattacatgtgttcacgtgtacatgcacatgggaatggagtccagatgtcactatggtcagttggtttccttgatcattatctttttttgtgtgtgtgagacagggtttttcactaaaccagaaactcatgtgactttggctcgacagctggctggcaagctctgggaacttcctattcccttccgtgcccccacctgggattacagacgtgccctggcttttgtctgcgtgactactgagaatccatgctcaggtccacgtgctggttcagcagatatgtgactgagccgtcttcccagaacgcccccctttttggttagcaaaggatgaagttatagttgtaacatacatagatgagtgtaggattgaacatagttcctgaagggcttttgcttttcttagcaaataaaatcagacacatgaagcatgggacacaatagttaaatgttcttatcaatgaaaattgaaacaagtattctaactgctaggatagaaaaatagaagatagtttaactggttttagtaacacaacatacagtccatatatttggtaaagtcattatataagtatataaatgaattatactgcctttaaaacgtatattaagatacttacctggcaggggagataccatgatcacgaaggtggttttcccagggtgaggctcacccattgcacttgggatgtgctgacccctgcaatttccccaaacgcgggggaaactcgattgcataatttgtggtaatgggggagctgcgtttgcgcgctccccttgggaaaaaaagtatattaagggggttggagagatggctcagccgttaggaacactgactgttcttccataggtcctgggttcaagtcccagcaaccacatggtaacttataaccacctgtaaagtgatcagatgccctcttctggtgtgtctgaggacagctacaatgtacttatatacataaaataaataaataacttaaaaaaaagtatattaagatgaacaagacacgaaaatagacaagttcccaatgacgacatgagaaaggaaatgtttttttcccatgtcgtttgataaaggaaagttaccgttttaggcactactcatgtttattaaggcaactttaaggactgaggaatgtgaactctgggctggggctgtaagctcagtggataacagacgtttgtaaggcttggtctactcttatcaaccactggatgcttgtcacagaagctatgataacgtaccccatccctcgctatctgccttactctttggggtaaggaagatgaaccagtggaagctcttacctgtaaggtgtttattttcttcccccaaatttatttttattaaacttatttgtttatctcctttacaaccagctcttcttttcctcccagtccccctcatgcaagtcctcctccatccccctttcctcttctcttttgagaaggtgaacccccctctgggtgccaaacgtcctcccccacctcctcgtaagatctggacctcctattgcctgggaacacctggctaaggtttgtttagttgatgactgttgggacaaatggaccagtggggctgagaaaacttcgtgctgggccagagtgagatgacaagtctctcttctgtcctggctgagctgtacactttgaataaaattcttatttctgagcttggttcacaggtctgctctcagtatcagtgctgacctgggcagtgccctggtcaactgtcttatgtcccgatagccttccagaagtgggagaaatatcttctattttagcattgagtagttttccatctctctctcaaggtttgaacttattttccagtacatagtgaatgatgaaatgccaggagagtcctggattatgtgtcagttgtcctcagtagctattatctaatgggtggatggttctagtgtaagatgactgtctcatcgttggatggtgatgatggatagacaatatggaaatgcatgaggtaccattgaaatgcatacttaaaaatagcccaaatggccagttctgtgtatgttttaccacaataaaaatagattttcactaaaaaaaaaaaaaaaaaaaagtatactattaactcccaaaatgtaaacagaatcctagctgaattaagctctcaaaatatgtccatcacctcccgggcctagtctgctccaggccaccagactaggacagcttctcggttgctgcttctgatacgatactcaagtgtggaccaaagcgtaatttgcaagggtgttgacaaaccaaaaacagtttgactactcctaccacctcttcaaggaaaccaggaggtctgtgttttccatttccttgtgtgtttcccttaagagccctggctggggctcatcgtccagtgatggatgcctccagtcaggagcacatattggagctgttgtggtgatctacgactcctacgtttcagggctgatttggattttctgtcctccccagccaggattctgctgctctgttggtttgtgccttgctgttcaacaggagaaaaatgaacccagaaacaagctcagaagcgcacacgtggtgctcaactctgcattattaaaaggcccaaagagccaggccttaattttctcctctgtaatatggagagctgagcagaggagcccgcctgccatagattcagagatgctatctaacaaatggcagtcttaacgggatctgagatcccttacatttttcccacctgacaagcccagagggctcattgtctgtggcttttctccgggctgctgctatcccccagggctgattgatctgtttattcttagcttgaggccggagctggaagggaggcagtttgttttgggcactgctgagaaaaacagactaatcacctaaatagcacctgggggagtgaggtggctctagatagaacagaaagaggcaggcgctctttaggggtgtgtggaggaaggaggagctggaagtggtagggagaaacctggaaaggtggtacagccagtagccagatgccagccgggccagcaaaggaatttggtgtcttcacttgtccagaggaagacctcatcatatctgttctccacatagctcctggcctctggtgcccactggtgctctggacagggccctatgagaaggctcaggtcttagctttcttgagttacctctgaaacttctaagcaagtgtctctcccattgtagagtcacactccgcttgctttccaggtcgggcctgcatcagacctgtctctagaggtatctttacttacaaatgcagtgggacaaattctttgtttctgccagctcagattggtctctgtctccaggattaagaactcaggcgcaggtctgagagatccctgggtattaagatttaactctgggccagatcagcaaatatttattgagtacacacaaaagacaggacacaaatcattaatcaacgcccgctcttgtcattggctgggggaaaggcaatataatgaatggctggcaaatacaggtgtgaattccacttagcctccccaaggcaggggacagaaaaattctggaatggtagagtccagtcgatactaatgggattatccttcagggagcttgaccaaccaactcaaggtatttccagtgattcttcacctccaagcagtgaagagtctggcagagttctgagcccccccccttttttttcctccataacatctgcaggtggtagaccagggctgcagttatcccagagctgagggatgagattttccagctctggtcctgtgtggaggcagcagggaggttcctgcaactcctcagggtcataaggccaagtcggaaaagcagcaagatgagctcgggagtctctggcatatgcattagcgtcccagggtaaaaactgtgtaaacggtacatgacttaattcctctgcctgttgggtgtctgtcatccttgagatttcccggggccagaagaggtcaacacgagctagtgtgacaacacctagctaagcaagggaaaagaatttctcagtgatgagggtcagcctgaaccaaggctgaccagaaaaacaagaggattcagttttaccccaagaaggagggagaagctttgtaagcggaaagaaaagaggactgtcttggccatggctctcttgggactatgtaggaactgttgtctttcttccctgttagttagcagctttggcttagtgggaaaatctaagattctcaaagcatcatgcagtgggggaaagggtttgggatttgacaggctggggagagacgtggtataaaatgtaatgcacggactctttaaggtggagaacagaactgggcagtggtggcacacacctttaaacccagcacttgggaggcagaggcaggcggatttctgagttcaaggccagccaggactacagagtggtctacagagtgagttccaggacagccaggactacacagagaaaccctgtctcgaaaaaaaacaaaacaaaacaaaacaaaacaaaacagatggagaacacattctgaggcaccaggaggttcggggagaaaatgaagctttgcccttgcaaagtcagaaggcaacagatcctgctcacttcctcagagagaagttatgtgctaaggtccagagaggtcggatggcaggaaattgaaagctgtgatgttgacactctagatcaagtgtcctttcatgatcttagacttttgtgactgaaaaaactgctctcctaccaaggaggtggactcagggctgaagcgcagtacagccatgagcatttccccttggaatctaatccagccaggtcatcatgaccccctgcatcatcaacagaagtggaacactggccaaacatcaccaaagctttagaataacatccacttacttccaggcctcccgagacccgattcctcgttcattcatctactggactttccaacttccagactttccacagctgtcaccgtttagcatgagtaacagcctgcagaagagtgtgggtgacagtacggcatgctgccgggcgacatcttgctcagcattgcttatgcaatctcctgccactggccatgtgccaggcctgacaaatagccatgaaggtgacttgtcacaaagtaaatatttttgtgtaaaaagatcactgttgagtttactccattattacatattctatgcttggcaaaataattattacagtaaatgtttctgcttctgcttttgcttcttcctccttcttctcctcctcttcctcttccttttcctcctcctccttctcctcctcttcctcttcttcatactcaaaagaaaatcttggtggaatattttcctgtccctggattattcggagtatccagtgctgtctgagttctgtctcatgcatctcccagcatctctatctttcttgggaaaatgtatctacaaggagtgaaccttactgagaaaggcaaaccattttctgtggttttgtttgtttgtgtgagtgcttatagatacagtgctgggccttttctacagaggggcaggagaaggacaccttgtcactgaacgtgcagcccatggcctccagcatctgtatttgccagtgttttgaggattagactcatgagcctgtggtgctctcctgtggtgctttcccgtggtgctttcctgtggtagcttaggtgtggctccctcaaggggcattgctttcagagcctggtttcattcaaaactcaaaatgaaactcaaaatttctctttctcctcacttcccccttatcaacatcttgtatttgtgtggtgcatttgttatgactggtaaaagccaccatcaatacattagtattaactgaagctcatagctgacattagtgcttatgccctgtgttgtaaagtctgtgggttggacatatgtatagtgtcatgtagcaatactcatgtattgagtactgaaccctaccatgctctgccactgggtatatgtatgtgtcctacaaaggaatttcattattccccaaatcccattcagtcaatttcaacttcaagtttagcttcatggcatctgacaccaggctccggactctgtgggcacctatatgcacatgtacatacgttcacatgcacatacatacatgctcataataaaataaacctttaaaaataattttcagttagagtgtagtagcacatgtggtactcttttgtaatgtgtggttatcaaaagtgaatcttacctatcgagattgaggaaagatcttgcccaagctatgagcagaaggtaacagtggcatcttccttgttcccatgggagacccaccaactctagccatgatggcccatcttccaagagtaagatgggaaaagccaacgggagacggatcagcacaccatccttgtgtgtgtttgaaggagcttaggctagattggtgggtggaagaagtgattttacagtcagcaagcgagtggtcaggagacaaagaatgcatgcagcacctgacgtgacatgtgcagatgcacacttcctcagcatatttagttagtatattttctgttcttagactggtagatgcttataatgattagaatctcccaaggtgacaaaagtgatcattagcatttaaaacatttgtagtttttaactagagccaagaactatgttcaggaaatgacccaggatcagagagctaagaacccactggtagctgatgctctcttgctatgtatcgactatggctgaagaatcatttcattggcacctctgattacaccatgtgtcagcatggggaatgtttgcacagcttcctgtgtgtcagtcaggcaaagagtgtgtgtgatacgggctgtggttcaggtttatggcccagcatggctgccataggcttgagcagtttggaggcctgggcctctgctgtccatctctctttttcatagttaaccagagacaaaaacaaaggtttaaaataatgtaacagtgttgcaagcaggattccatgctttgctaggctggagcacaaaccacctctccccctttagaaacataaactattgcaaaaaaagatgagaaaggccaggtgagatcttgtgagtgtgatttccctgggaaggaggcatacgtatttagctggcttgcagtaaatctaactgatgttttccaaaggtaaactgaaagccatcaagtagtagagtttatctctcgacttcatttttattgccacaactccgttctgtttagaaagcaaacaagccgttagaatattccaacagaaatgtcgccaacatgatttagtaggtgggttatttagtgttcattagcagagtcccagctttggtggacagtggtgaatttgttttgcctctttcaagtccagtgaaatggcctttatttttttcccacccaggtagtcaccctgtctcagtaggaagattcaaattccaacggctcttaggtttattccagagctgtcaaacacaggttctgagccgttctctttttcagttttgggggccctgcagtgcttggaagtgttgacttttagggagaggccaagaaaagcctcagtgtgtgccaagacgttagctgtgggcttggcaccaggaaggtcagctggtggggatggggtcagttggcttccagggtacacttcccacagaggcgattcaggagggctgtgtggtgtgtatggacttggtgggtcttactgtatctccagaataacattcaggatttgacaaatctatccatttgtctgtagtctcaaaaaatatcctcgaactggaaggcgactttgaaatcatccttagccaatttcagtctgatttctctctttgcagatccagaacacgcctcaagaggccctgtgactttcagggtccttgcctcaccccctggtcaccctcagtctttgtttcttctccagcctcttctggtgtctctctcctttctctcctcattggttacactctgaagggaaagcacatggatgttgagaccagccacagaagcaaatttcgtgagctctgaagccttagataacaggagctgggagggtgagtgcttttccaagaagcaggctgcgggatgctatgcccatattgctggattccccactccaggcactgggccagcccaggcaaaccaggggtctgcagcttccgtgaccctttcggtgattctgtctctggttaggactcattatatttcttccttcattcccacctttccccattagtttccttattaaacacacttgagcatttgaatctgaaaccttcttggaagcaagccttcatcgttccatttggttatcacattggctgccttacttgtgtttcctgtctcacctgttttcctcccttgggtgttttgttgttgttattgttggtttttgtttgtttgtttggtctgtcctcatctcccaacttctagagccatctctggaaatcatcacttggcagagggcagaggaagggagcctgactctcagtgctgtgtgccaagaaaggatcttcttcccattatggcaacaattcccgtgcatcagacatctcttagacttcagtgtgtcggcttcaccgggacctcagggggctctggggtctggaagaatcaagagccactgtcttgcaacactgatcatgaaggagcctagccactgacatcttccacaacaactgcagagcacaagcatgctttaggccattttttctaattaaatgtcttcttgcaccttaggaccttagaacaatgcaaaacaaaatgagcatgcacactttctcaaggacaatactttctgtggcaacacgggtcttatcagacatcaagagcatgtgacgcctagcaagcagtagtggtctatcctgggactgaagggatatctttatcttagacatgccgaagagcacttgaggggagagtgccagggaggagactatctggaccttgtcagagcctgtcaggagggtgacagatgagagctgcaggggtctcctgtgagaaaccctgatgacagagctatgtttagctaaagatgctgaaggggaggggtctcgcttggggggctggggaccttagctggtcactcttttgtcatttggtgcatggcataatgggagagtcagttactcctttggccatcagactcagcaactgtaaactgtcagtggttctgccagaaatccgttcagagggttcctgcaagctcccagtgtcctttgcagagttcagtctgtttctctggtgatttttgttgtctgctttcagtgctacaggtcaagcctgggggcccagacatgatgggcaagtctaacccctcattccttgttgtgttatatgcctgtgtagtggtgtggatgtatacaagtgtgtgtatgcctgtatgaagaagctagagtgtgcatctctgttgctcccctctttattctttcgacagggtctctcactgaacccggaagtttcagctttctatctaagctgagtgtccagtgagcctcggtgattctcctgtctctgctccttgcccctccgagatggggttataggtgccaacagccacattcagtttttgtgtgttctgggaatccaaacccaggtcctcatggttgcacgataggcaccattaccacccactgagacatccctttcttctatttatttttgtttctgaacatgcacctctagcaggggtcaaggtctggagaggttacagttgcatttataatgggttagactttctttgtcattagttacctggacacctgtgtgtgagatggctctaatgcctacatctgctgtcagcaatgtctgcccgaattcatgctctgcctgtggtgtgactctgacattaacttgcatggccagatgattggcgactgctgcctgacaggaggctcctcctagcagagaccgtggatgtggtgcccgccatcactgctagagggcacatcactcattgactgccacgtctggtctctacctgagcagagcatggatgacaaggatgggcgctgggtttagacaagtacagttgtctctcgctggaagttgtaaagaagggtgagagatgcctaggcttaactgaggatactggtgatcgtggtgggacctgtgtctcccctgcaacgggtgtggatgtacattctgagcggaagtgtgcatgcttaataatataacctactagagagcaatttccactgattccctgtcattttgtagttctgtgcaaaaggcattgaattgtggattaaaacgggggtgcgtggccatcactgaacacaccagctgaatgcactggctctgggaatatcattagctctaccatttctgcttttccggaggctagagagggatggcgggtatccagagagaatgctcttgatggtgtgttccttggtggcaattggggttttccctactggcttcatctcaggcttgggcttcattctattttcaggcttcagggaagctgctgcttttcagggctgtcaacctgccacctgtcagtaacaccgtcagaaagatatggcagcattagtgcatggaagagagggacacaggcgatttgcatactcttttcctgcctacagccctctatctctccacttattcagctctcttcctgtgcaatttgaaatgctcagacaaagcactggaatgacctgaactgggagagaggctggaaccctggtgagatcacctctgtggtaggaaacagtccaattccttcctttcttcctttccagtgggtgaggtgggagcccagatagcagcaaccctctggagtgcattcagttaccattcagtccctctcttgctgcaagccctgtccaggctcccagctccttctcatttgtacatgacatgttcatcagacgatatcacagtaagcatgaattggctagttatgcacacgatcagtaagaccaaagaggaggttactatgactgcttctgtcagttttcatagtgaaggcctctctaaggaacctgaggctccatgtagaattgtccccttttggagcacagccctcttccttcccagggctgtgcacaggagggtaaggagatgtggaggggaccatcttttcatgagcaggacccctcaggaggagtggttgataggtaacagaatatcttcgtgtgaatcctcttccaatgattctaggcagacttcactgggccagcgagctggccagaggcccccagcaggcagccacatagtacctgacgatgggcagtagtgatggctgcagggcagtgttggaaagaaagtccatgttggatgaggttgtatttactcactggttccctcaatgatttcaaactgtgttagcaagaaagacatgatcaccaaggactctggaggaaccccagagaaccagatgggacagagaggaaagagggtgaagggatttcagggtcaagggtaaccctgatcttgatatgctggtattcagcaggacacctcagagctctactgaagagacgccagggtgatacctgcttgtcatatgctggcaagtggaagggccaacacaggtagggtgacagagtagaacccgttactctgaaacccacacttttcctttttgtgtggagaagaaagaagagcccggaacttgttttcatggtgaagtgcagagcatatgtatgtctcgagtccactttcagcaagatgcaaatacatacactagtgacactcactatgttcagtcattgaaggcccgaagataagtgatggggagggtgtcacaagccagcttttagaataagcagaaacaagctgagtattatagcgcccctcaaacccgttctcagtatggaaacttaaagactgaaactccaagaactgccgaagaaaaacacccaggagtcaagactatggaagaaagcacgggcttgttagcattctcttgcagtgatgatacctaaggcaaacaattgaaaggtttggttttgctcatagtctctggtttcaatccatggctacctggtcccattgctttgggcttgtgatgtcatggtgagagcctttggcaggagaagcctgctcacctcaaggttcctaggagcaaagagagaggaggggaccgagtctcagtgtcctctgcagaggcatatacccagtgagctttcgtccatgaatccttatctaataaaggttctgccatctccagtaatgtcgagctgggaccaagcctttatcacaagggcccttgggggacattcagctataaaacataacaattatgagatttggttaagaaaaattgagggattcacagttacacattgaatccaccaaggcagacaactgtgacaagagggtttccagaaagcctcaggttgtcttcttgactgacaactacaaaggaagggttatttttttcccctcatggaacactcagtggttgactgtaagtttttatgtcaacaaaaccatagctgtggataatagagaggtaggcacccactgtgtagtaatcactgcatattattgatatgcaatgggaggtaatgaaataataatgaaacttcagaaaatgtgctgaagtttatgctttgagtgtgtgtgatgccaggataagccagggctgcactcattaaaggcaggagcataacaaacaaacaaacaaacaaacaaacaaacaaatgctgaagccagagatgattccctggtaaaacacttatttagcaagacctcagtcgggactcccagtactcacatcaaagccagatgtagtggtgtgtacacgcagcctcagcactggagaggcagagacaggaagactctggtagcttgctgctcagcttctctactcaaaatgctgagctccaggttccgtgagagaccctgtttcaccatgtaaggttgaattgataagatggctcagaagggaagggcactcactgccaaacccgacgaccggagttcagtggacacaacgtatatggtagacagaaagaaccagttcctgcaagccatccctctgatctccacacttgtgctgtgggacaacactgctcacccagtaagtacataaatgtagtaagaaactttttaaaagtcaggcgagagcattacaggaaggtggcttctattgatttctctggcctctacacgtgcattcatcacacatgctggcacacgagtaaaagtgtgcctgtacacacatgcacatggatgcacttgccacacacatgcacatacactgaaaaggagatgcaaggggtttggaagtcagatttttgtgtttggactgtagtgcacttacccagtggcgtgtgtgtgtgtgtgtgtgttgtgtgtgtgtgtgtggtaagattcacaaggtaaaggagagaaccaacttaggaaagttgtcctttaaccactacaccggtgctatagcatacaccatatcaatcaaccaatcaatcaaaatgtaatcaaagctttttttttgatttttaaaaacaattttattttatttttaattatgtacatgtgtgcatgtgtctgtctgtacttatatataccatatacatgcagatgcctttagagaccaaccagagagtacaccagatcccctggagctggaattaaaggcaatggtgaataactgtcatgcatgctggaattcaagtcctctggaagagcaacaagactcttaactactgtgccatttctcagcccctctaactagctcttattaatctataaataataatgtatttttttcatatttcttattctatcactttgaggaaatgttattctatgtaatcttttttttttaaattaggtattttcctcctttacattttcaatgctatcccaaaggtcccccatacccacccccccaatcccctacccacccactccccctttttggccctggcgttcccctgtactggggcatataaagtttgcaagtccaatgggcctctctttgcagtgatgaccgactaggccatcttttgatacatatgcagctaaagacaagagctcccgggtactggttagttcatattgttgttccacctatagggttgcagttccctttagctccttgggtaatttctctagctcctccattagtaatcaaagcttttaaagtgacctaaccctctcccgtctctcaaggttcagatgggcagtgggctggaatggggattctctttgtgaatgctcactcctcaaatcaagacagcaattgaaatgctattatattttttgtttggcctcaaaggtcatacataggtgagcacttcctttttattttgcctaaattctgtactgaaggagcctctgcctactctaattgtccttcacctggtcagcttccaccccctgtctttctcttatctttctcgccacacacctattctggaccccgcagctgtgcattgtcctgacagtttcagtccctctagaagttgtactggtaacctgtgctccctagtgagtgctcctgctcacatacagcgaggggggctggctagtttgttggctcctcatgggaacttgcttttattcatggtccatcactttcatattctgtttgtatcgcattaaggctgctctgcacaggttctggctttgctggtccatggcaggactagaggcgagcctgtggggaagtgagcttctcagcggagaatcctggagactctgagtgcatctggcattggtctatccaaaccaaagtcaatggagtcggagtaaaggtagggtagtgtgccaatgtaaaacttcctgggaaccgaaaggtgtactgggcagcaaagatcagaccttggtgagaactaagaagacagcacgcaggtgaaaagcaagaagcaacacaatgcctgaactattgtagcacaggagctcccaacagacactggcgaccccttgttcaaatcagcactgtttgtcaggcgaagaggaaacaaccaagtgtccatcagaggactcacccaaggaaggcatggaatcctacatgccacagcatgcagttcaaagacattgacctgggtataataacccgaacccagacagtatgaacacagtggtccttctctcagggagttctttgctgacacaaagtagcatggtggttattgtgagtcaggggaagagaagagggaagagccattgtttaatgaatccaggggtcgagtttgggataaaggtggatggcgttgacggatgtacaacaacataaacatgcttaacaccactgaatggcagttgaaaatgatcaaaatgtaaaactctgtgttttttatgttttaacgacccagatggttgggactccctatagtttgccatctaacatctaactaatccagatcttttattacccctataaatatataggggtgaggggcttatttaggacttattagggagtagaaaagtgcagaggtcttctgttacccgtagtaaggcacagaaatcgtgtgtgtgtgtgtgtgtgtgtgtgtgtgtgtgtgtgtgtgtgtgcttgcatgtatacaggtgtatgcatgtatatgtgcacatgagtgtgtgtatgcatgtgtgcatgcatatgtgtgtgcatgtgcttatgcatgtatgatgtgtatgtgtgtgtgcatgtgtgtatatgtgtgtgtgtgcacatgtgtgcatgtgtctgtggtgaatagcttgtttttcctttgcagagggagtggagcgaactccacagagcatcttgtactctgtcaaagcagttctcacatccacagacgtgtccccagccatcctcactctcactgattcaacttgtgctttgctcactcctcagacccaggaaggctcttagctgttattccctggtggaacggaggctgttcagtccttgtatcctggctgattagtggcagggtaactgcccttcatttctttgtcttcaaaacattgccacctgggtctttactgccctcagagcagatgtcttgtgcagagtcaaattcctccagttagtccttctgtgtgcaataacatggaggtgagaagccttagggtgcacagaaagggcagccttgcaggcatctgcccaacagtggcttccatatgcagttaggcctgggatctctgagggaatggtgcacagcaaggaccatgttccagaaaggactatggatgccaggcaagtacagggccagaaaatagggagaaaggggtaatgggcttacaaaagaggggaatccctttcctgtacagaagctgacactcctggcggacagtagagaaatagactgacttaatgaactttagatctacttgaactggagttcaggctgaagacctcatgtcccaggccaaactcaccgttctgtgtttggaatctatagattttggcagctttgagaaaggatgactagctatgaaggccatgagctaacagcacagaccaaggaggcaaatgcagaaaggcctgtccagaatctgctgggtccttttgctaaagcatttcttttcatcccacacgtggggcaggaaccccctagaacaagggaattagaacctacagtaaaataaaataggccaaaggggcttctctgtgtacacagaggcaagataggggtgtgtgtgtgtgtgagggattatgatagtatttttagggttatagctggcttagtgggaaggggcttagctttttaagacccacatcgtccactctggaagagacagagagagacagagagacgggaggaagttcagagagaaactacttcagaggccttatgttttctgatccccagtgccagttttagtcacactaaaggcaatgttttctgagcatctgctgtgagtctggctttgccaagtcacactgcaaagatgatgttgccaccatcccatttgtgtagatgaggaaggctcaaagatgctaactgagccactggaccacattcctgggtgatgaagctggggttgtatggcgaaagggttggagctaatctgaacttccagagtgttcctaggatttcaattaccttttaaaaaaaaaagtagggaacggctaatcacagctgggcccagaaacagcgaggtgtccttgccttcctgcccggctgccttattgtccctttcatgtctgaattcagctacccacttggccttctgtgctagcaattattggctttgtgacctagcataagatacagtgggcttccttggcattcctctgtggtcagtccctattttagacttttacttcctctgtgttctcccagacacctatacctggtgtacctgttgcctagagccctgcatgtatgtgtgcacacacatatatgtgcccctccagctcccttacataacaggtgaaatcaagagtctgattaacctgaggagctggcatctgtaggatgctgggatgaagcacaagagtctcagggagttggattgcaaggaaggaagcttgagaagggagtcagggtggaaccctccatccaccatttcctggagggaaagagctttctccacagggagagctgcccatcagacacctgggctttgtcctgcccagatagtctctggaggtcatgcatctaccattctcaaaattaggagagaggaaagagacaggcttgcctagggaccaaagacatgcgtgtgtaatatctagggatacacagcaggcattgatcatggctatttgtgtgccttactgtttcatggcagatatggcctcattgtgaacaccaccatattattggcttgctctgggaagactatgttcttgcctgctcacaaatgggcactcatgaccagaggcactggatggggaaatgtagctctctctgtacagtggagttttgtgggggctacttcttggggtctctggtgctcctctgagttgagtcatttcttcttctgttctcaccaccttccagcactcagtactttggttctttttttctctgaaacactgctgatagcctacaagtgcttatattttctttctcccaagagctcagggactgcaaattcagcttcattgaccaggaagacaccactttgttaattagtctgctttaagcgaatctggaacccaggctaggattcttgtttacttcccagatcacagggatttatagcttcattaacagttgaacacacagttttaaagcatccgagcgcaagctgatcactttgaacacccccatcctccagcagtctgttaggccccctgccttctggctggtttgtcccttacctgtttccctgggggacaccatggggaggaaagaggcaggaaaggagaaacagagaaaattggcatgagtgagtgagtgggcatcctggcttattaaatagaactgtgcagggggtaggggtgcttcagggagggcagccttagaagttttgtaacctccgtcatttaacctggtgacctagaagtacttaggaagaggagtgtgtgtgtgtgtgtgtctgtgtgtctgtgtgtctgtgtgtctgtgtgtctgtgtgtgtgtctgtgtgttcttaacagctgtgattactaatttgctgtgcttactaatttagatccatttcttcttttctccttcagggcaaaaatgattagacgaatctaattgtgcatttgtgatgacgtcagcactgtgttggctgctttgtttgcggcctactttctaatctttgtgttcactgatgtgtttcaagtacttagatcagtgactgatatttaagaattcaatatttaccgaaggagaaaatgagtacgtctgtataagtgcatacatgcccacaaagtagtttcttacatgtagttatttatttgttttagtttagtatatgtgccatgtgcatgtgtgtgtgtattggtacatgtactgatgtgtgctcatgtggaggccgtaagagggtggtaggtgtaattctttattgctcaccttatttttgagacaggagttactgaagctgaagctctctgttttggctaggctggctgcccagtgagcttcccaaatctgcctgtatcctcccagaaactgtagggttgtaggcatgcatgggccatgcctcaccttttcatgcatgctggaaaattgaactcaggtcctcttcttttatagcaagctatcttatccactgagctatctcttcagccaataaaccattgctagattaacatttagtatgcaaagtatgcaaggaattagaatgtagtacagaaatccatgaagtagctctgtaaaaatgacaagtcccacacttgcatattttgacccgtcaccattctcagcctggtcacattaggtcttgttcttgtcccaaaaatatgtcagaaatggcatattaaagatagaaacaatcaaccagacaaaccaacaaagtggacgttaacaacttcatgggaagagcaaagccaaaaagcagacatgacccctcaggggacggccatctggagctgcttggttcaggaaaaacagccattggcacttcactgtgtctttggaaactcagtcacgtggcactgtgaacactgaatcatctaaagcttaagttctcttctataacttgtcagatgaggccatatccggaaggttcctcagactcttaggtgactcagtaaccacttcttgaagagcttctttcacacacagcaggaggcagagaacaatgtttgtggtcctggaggccaaacccagcccacttcttgtctttataaataaagttttattagaagcgactgcacttcctgatttacatattcactgtggcaactttctctttcctgccagctgagtccagtaactaaaacagaaactatatagccaaccaagcaaagtttttgttgactggtcctataagaactaaagatagccagctgttcatgtagaacgtttatatagctggacgccacttgagtgttggcttctacttccatgtgcatttgattcgtctgcatgtatggccaagtactctgtgtgtacatgtgtatacacagttctgtcaggtagtaaacgcagttaagtgcagggcatcacattccctcgcttctgaaacatagctctggaggagtctgggcaaaattagttatcattcttcttgtgtcgctctgctgatgacaggggcagcgtgttataacctctgaaaaagacattctggaggaactccggttcccttggagacatctgtgcacaggtgccatcctgcagtcacttcttaagggtgtctgtatcgattgtacccaaagcttacatttacacaagatggatggccttgtgtctggaatcaatgtgaaggatttggtgagcacgtagcccagattacacgaggtccggtgggatttttaaatggtcctggaagttgactgcgaaggtgaaaaatattatttgctttagcagatagaatttttttcaggttatttttgtggtcttcttcattagcagagaaagcttcctcagccagggctactgtgctgacttattctatgctaatgtggtcagtgccacttcgtgtcaggttagaatagctctggcttcaatatactctttgtcctgccaatatcattcttcactgtatactttgagttttcaaggaatggaagccaaccctcttcatggaaagcagactttggagactgttgattaacacggtagagcatgtattaacatcaaagttagattaagacataacttggacttagagtggggaaggaaatgtctttagttttgttcttatttttagttttaagtgttagagcgtttttcctgtatgagtgtccctgtgctgtgtgtggaccatgacggcagagaggcatcagatcccttcgcactgaagttaaaggtggttgggagcctccatgttggttctgggaatcaaaccctggtcctttggaagaatgccagtgttcttaaccactgagccacctctctagccccaaccccttattttgagatttagttcatatgccacaaaaattggcactttgccgctcagtagtttttagtaaatttatcaagttgttcagtcttttttctttttttaaataagagaagattggttcagtttgaggaactttatgttgacatttgctagatggtatgtgtgtcatggattatgacagtcccagtcctttgagtttatctgatatgtggaattgtttcagcccatgggcaggctcaggatatcaagacccaatgcctaggcctctatccagagcacagcctttgggggtggctggcgtctccccttctgggattctctttcctccagtctggctgtggggtgagaggagtcttcccttctttgatgttgctcttgttagtgaactgggggatgacacacatttcagcagaaatttttggaaatatttgctagaatgtccacataccattcagcctctccatcagtcgcttccatcatctggactccttgtccagaatgggcccatgcaaatgagccttccttgcgtcactcgttcagcttccaagagccattacaatcccaccatctataaggtaagagagactgatcctctatcctttagggggcctcactaggtcctgagagtgtagagaagagagacaggtaaggtcttgttcccacagagtttctctatagtcaatgaatagaagacagttagtggctgatcatgaattcagtttatagtcaccaatgtgttgtgaaaaccaaattatatatatatacatatatacacatatattctgtaaactgtatatctgcatacatctattctgttatatggtagactttagctaaaaagttgagggcttaaaagaagcatcttgggttaaagcaccttcagtggtttagtgcacaatctccttttgtgcactctattttgattttatcttagtctttactgacatattttattatctgtattaatggacttcagtatattcccacacatgcatatactatatcctgatcaaatcttgtatcatttggtgcattaagatagtatgagaatcacttactgaacaggtgggtcaggaggtagggcagaggttgaaggggaaacactccctgggacataagccctggagccttctattgctttgttctttgagccccacctccctacagtgttccaggctacagatgttttaccatgcagatgttgatatttcttatttttgactttggttctgggttttcaaatcctccaatgacaaactgagttgaaagtgagcctttcttttcagttgaatgatgaataagagtttgtgcttgggagaccacactaggtggtcaggaaggaaaagggctgtttgaccgttagtatttagttcagagcccctggtggacagaatggctaaatatggtctctgtgtgtgtgtaagcaatagaacacacccccgactgtgtaagattttcacatgtttaaccaaataaatggcttcctgcctcttgtgggtttttcttttaaggccggcagtcatcacaccaagatgacaaaattcaagagtccacggcatcagagtcctgagtgttggctttctaagtccagggaccctaaggaaagcagagacagccttctggatgttttgctcctgcaaaaaattgtgttgttgtgtaacagctgttggtacagttctgtgcagagcacagcatgcccaaggtcctgcattccatgccgagcgcccaaacaagcaaacatgctgtttgattaaaagtatttgtgctgtactttaaaacatgaagagtgatatggacagagaagggagggggtccatcctcccctcccaaagatgagcatgtagtctatggttttcctaggtttttttgtttgtttgtttgtttgtttgtttccaatattttcccttggaaccactcagaccaattctgttcttctttcctcccaccattttctcccagaaacttcaggcaggaggtgggtgaagtgaccagtctagtttttcagctgtccattccaatttgtcaagattagcactcagtactccagagctggtgagctgaggatgagagggtagcctccgagtgagtgagtgagcgagcgagcgagcgagcaagcaagcaagcaagcaagcaagcaagcaaacagctaactgaggcctttgtaagaagctgggggtaaagaggagggggaacgtgagggaggagccaacttaaaggacttggaaaacagcaatcagagatgaagcatctagattaatgcctccctgagaaagaaacaaccaaaagtacatgttccaggtgtctgactgcacttaaggttgttgatgccggaatctgaaatacagcttccttgtggatattgaatgtcttagcaacttggtgtgatgccctgcagaagctgtaattatatctgtgtggaggccacctgaagcttaagacaggagcaggttaaatctgtaaatcacaagaactgtttataatatgtaagactttgcctttgacccagcttttccatgggatgtgagctcatttttcactttgagccaagagtgggagatgatgccatgagattcagtgagtgattcaggtctatatccaaatcagggcagtggcagctaatgtgaaccaagcagagagtttttcatgaatctctgtctgtctgtctcagagtatggtgtgtgtgttatagatacatgtttgtgtgcatatgtgtagttcacacttggactcgtgaaggctagaagttgacattggccatctttctccatccctcttcatcttctctttctgagacaagctctccctgaacctggagctcatgagcttggctagagtagctggctgataatctccaggcacctgtctgtctgtacctccccagggctggggtcacagaggtgtgctgctcctcatgccttttaaatggggcctggggaatctgaactcagggcctcacgtttgagcgtcgagcactttatcaactgagccatgtctctgagccccttcttccacccttagactttacagttcccctccccacagtaggttataggtagagtagatattgtcctcaccactgacaattaaacacaaattctttccttgtaacgaataccccattcatcaatgacaggaacccagctgacaactcctgtcagcgtgtgaaagttttgacaggctggaacagcaataaaaaaaatcatgagacattgacttacaattcatggaacatcagccttccaccagcgaagaacaggtggaagtgtggtttggacttaggtggtggaatcacaaacacaaacaaacaaacaaacagaaagctttgtctatcccagctgtcacagagggtaacaaagctacaagacccagaaggcagtgtctggccagtgggtgctgaaggggttccttagtggagtctctgcatgttcttgggaatctagctatggccctggttctggcctgctcaggttggaatccctccccacctttccttccctcctatctccatttgtttcccctgcacttctgtgtagaatttatttgaaaacaagcatccccacccccctttgaaaatcactcccttaagtatcaagtgtgtaggcctgaggatggcaaactcattcccagtgaacaaaaatctgccaggatccagacagccttgaggtttgttgagatgacaatgccttagacatagctttttctaaacttcatgcttgtccgtgtcattctgcataagaataaacagggggttctgcctctttcatgcacattcccaattccatctaaagcattgctgactaggagagatgcttcatcatatgcaccttaaaatatggagatgtgtgtgtgtgtatgcatgcatttatctaatagtcacggtaagttttgtgctctcttgggcatttcagcactgtgtgctgttagatcttattgttaacctgacacaacctcaagttatctgggaagagggaaccttaactgaggaattctgtagatcacattgggctctaggcacatctgtggcggcattgttttgattgttaatggatggagaaggaccccgcccactgttggctgtcctgtccctacccagctggtcctgggctacacagcaagctagctgagctagccagagagtgagccaagaatcagtattcctccgtggcttctgtttgagttcttgcccttgcttcccccagtgatggattgtgtgacctggaagtgtaagtcaaacaaacccttccctcctctaaggtgctctggctcaacaagttttatcacaggaagaggaaatgtaaactagaatactcagcctttgaccatggacgtatatctgaatgtcctgtgttggctgttgactggagggaaaagaggctcaaagcaattaccttagctttgctttttacattaaagatggggtgaggtgtccatggtcctcactctgtctgcatcctgtcttcagtttgtgtgaagatggaacccagagccccttcctgctggggacccctctcctccctcctatcacctcttagcctctactgacagttgtctggggaatgtcaggactcggcacagcaagcctttcatccctgcctgtgcctcttgtcacaggaagctggaggttgggtcagttgtcatctgctctctacatcccaactgcttactgtgacagcgcggaatgcacattccattatcagagaaagtctcagtgcctttggcctttcttctgtgagagcctttcatcttcactttgtaacttctcagatcacatctgttttctcccgtgcccttgaccaccgagtttggtatctgttcttccttgctatttcccactgtttttccctcagctgaaaggaacagagagaatggcttttgataagaactggatttatttggaagcaagcagatcagcacccatctttctactggaatacaaaaatgatgtcaaattaactttcaagttaaagaaaaattaatagaagtgctcttttaaaaagtatatatatcgttgtcatcatcatcattgtcacatcatcatcattgtgtgtgtgtgtgtgtatgtgatgtgtgtgtgtgtgtgtgtgtgtgtgtgtatgtgatgtgtgtgtgtgtgtattctaagccaactgtggaggtattgatcttcgacctttttctctgccctcactccatgtgacccaaccccctttcataattttagtacttttatcattgacttcctcaactatgcctccattccaaatttcatccctgaatttgacttaatagcttattggtccatttgtgctgctataatgtaaatcacaatcctggtgacttataagcaacaagttcatgttttcagaggtctgaggactggggaattgaagatcaaggcagattttatcctgtttttatatgtcatctcctccctgtgtcctcccatgctggaagggtgtgggagctctctggggcctctgttatagtcctcgtgcccttgggtcctggccactttgcaaaggtccaagagcatagtgatcatctgaatgtcaactgaatggatttggggggcatttgttggacgacagcagtcccactgagctcttctccgccattttcctctttatttgttccactgtagccaggctggctttttgctgctcctaagcacaatggctgtctcaggccagagccttggaatgtacctacttctttgcctggccctcttcttcaaagagctggttgtagctcacagcaactcctttcaggtctcccttcacagagaggccgcctgtgcccctcactctgattccaaaagccccctttcctctgcctgccttattgtttcccatgtttcatgtgggctgggccacctccgatcatttactccatgttagcatggctaggcattgcttatttgacccattactgtttctaggggttcaatacattaatttccatagtatcccatgcttttatcaccacaggaatgcatagctgtatgcttccaaaactccatgagctgagttaggtttaaatgtttttttctttgattgtaaatttattcccatttagagactgaataaaataatgaatatgtaagcgaatcatatttcctcccttattaagttttcagacacatataaatgtgcctaaacctgtaataaaagattccagaagattttataacatgttttttagttgatggtggttataaataggaatggtttaaataacattaacaagttatggtctggctaaagggccatcatatttcgaagaggaaaacatcaataatcttactttactactttcccaaacctttgaaatacatagaactcattaatgttgaagcatttaatagaagcaaaagaaaacaacaaaaatccactgtgatagtaactgccaagagtttaaaggttttttttaataatgcctcaacaatattggattaatgaattagcttctcagaaaaaaggctggactcagttaacataaattgggttctactatttgcagaagcagcaactaaaattctgcttgtaaataatactagggaaagatctggaatgaatcaagccgctgtcacagctgggctgtgttttcagctctcaaacacaggagaattaatattgactataactgtatttgaagctcaaagaacacaaaaaaatgaagtcctttgagaataagcttttgtacaaattcagcagggaaccacatgagaaagcactttccagagacagactcccaaaggctttgtctaggaacagttttaaagtcttgtgggacacctcttggccctgccattgtgagtagacagtcctgagtacagtttgtatataattgccacagtcttttccctaaagataggggattcaggcagtgcttgtgaagtcagctggcctggtgctgctgggttggtggacacaataagttctggtcaagggcagctcagcaggtccagagctatgtactgtctgtctgtctgggaacagtcccaggactgcagagtccttgaatgtaagctcttgccaggctgaagcttttctttgtggaggcagttcctggagagtcccaaccatctccggatagacaaggccaagaagcacagagaagtggacctttaggtggctgcatggctctcaggagacaccgtagcccactctgaagcacaccctgtttcagaccgtagagactgccagtaatctctaagaatggggtggtaatactctcaggcctaccactttcctgtccaacgtgcactttcccaaaccatcaaggcccaaacaaggcttcacagagctttcttccagatgcaaatgtcctggtgcactgtggatgttctattgttctgcaccctgagggctgctcaggcttgcttctcagaaccactcagggctgggctctgggaaaaactgctggttaggcaggcctcttgtttaatgggaacatctcttctagtctgcagccagagcattcatggttcagttcttcctagatgcagagactctgggcaaccatctctaagtcatctattctcttggcttgcctctgaagtggcttctagcagacagttggatggcaggagactgttggttttttttttttttttttttttctggaaagttccattcgtctgcccggccacctcagcagtaagaggaagtggcaaggaagtgacttgtcacaagtgttttgtgactgtgggcacagtattctaatgtgggtgctaataaagaccaggcagatcatgagctgtggtagtctttgtctgttttgacccatctgtgtggtacttagctgaaagcttgcctctggccagacatggggtcagcaaatggagagggacattgtaccaggcttggcacttgcatcttggcccttcatacttgaatgcttacttgggtggtctctttgctgttctatgtcacctcttctgatacgtaggccttgaaccattagctgcaagctgagccatgcaccatcaggcctggcttacatcccagctgtgcttttttgaatattaagcacaggaaaatcttagcatctgtaagaatggcatgctgtgtttgcagggcccatcatacagtacttttgtgtctgtgatctattccatcttcatgtaaatgcccagggaagaggagtctacttgcctgtttgataaggaaattcagacctgaagaactgagtgaggcagatgctgggaaggtagttcagtaggtaaagtgcttgctgcaggaggctcagggctaggcttcagagccttagaaacccatgtaaatgctgggtgtgtctagtggcctgcatgtgattccagcctcagaagacaaagacagaattccctggacaaactggccatggtgacgttgttgagctctagatttgagtgagagactgcctcgatggctagaaattaagagcaattgagggtgattcctgacagcaacctcaggcttccacattcatgcccacacacatgtacacatgaatgcccacacacatgtacacatgaatgcccacacacatgtacatatgcatgcccacacacatgtacacatgcatgcccacacattcatgtgtgcacgtatatgtgcgcacgtgagcgtgtgtacacacacacacacacacatttgaaaaatgataaagaaagattgaatgacttaccacagtgatcaaactggaaaatagcaaagcttaagccttaaactaaaacctaggtgttcagaatgaagtccagagctatttactgagtccccacatgcagagggcagactgctttctctctggaatctttaattgtagtgtgttttgtaatatccataaactttagaactgcgttagctttgtgacatggaccaaaggaatgcacaagtcgacactaaacaagcgaggaatgaccgacgctgttgaatgaagaggtgtgagtgaacgtgcaagatgaatgactagagaactcgacaaagctttacttgccctcatattggaaagctctgcactgtaaaatgctactgtacagtttaggactgtgaccacgtgcagcatgtcacacctaagcttttcctctcttctgatagatggtgaatgtgaacagacggagtcagggtcacaccaagggtgttgataaatccacaagcaaaagtcaaaatcaagacctatttaagaaggtcttgtctggtatgatctcccccccccccctttacagttccctagaacatactcagggcagagttttgtgctagatttttggtttggatttttcgccagactacgtgaatcacgataaacattttacggccctcccttttcaagatcaagctggaagtgtgacagaggcaggcttggaagaagactgagttttcttcctgtgtttgaaaatcttaattttcagccagaccttttcccaaaagcttattgtggaaggaaggaggatcgctgagtctcgggaatttgattggtggaatgcaggaataaagaaatgacaggtatcagacatttggaaatctggaattgagtgggctgtgcttgctttgatgggtggcacctattacacaacccagtttctcaagtcgttcattacatacagcacacacggaggaggggctaagctagtctcagcgggaggtctttgtaggggatcagtctcaggctgcagtcatccatccatccatccaggaggaggaagctgtggttgctagcttttgcacacattgttcagttgttcattaatcctagcacttggaccagaaggtggctttgccatttccatggatctgagacattggggtcgttgcccatgtccgtgtcagcaatacacttgggacttcatcttctccccacagagggtaaggagtgacctctagatttatgtagtccttcttcctcaaataagtgtgcatgagtttggtgatggaggacctcagaagtaggtttagagaagttgttggttctagtacaggcatcttgtgccaggttttgatgggatgttctaactgcggttccagggtatgctaagccatttctagtgtatcaaggatggagatactaacatgcaatgagggctagggatgggtgaatgggtaaggtggtttctagtaaccatgtaaaagctgggtgcaatagcatagtctataatcactgcctgtggggaagcagaggcagacagatctctggagctcattggccagccaggccagccaaataaatgagcattgggtttagtgagaccctttctcaaaacacaaagcagaaaggtgctgaggagggtaccactggtccctacatgcacgcaacacttgctcatataatcatagtatataacacacgcacacacacacacacacacacacacacacacacacacacacacgtattgttcagctctggcctctaaggctctctaagggtctcctccagccttgggcatttaggtcagagtctgtgatttccctcaaacaaagcaaagccagcacaggcctggtaaatggtctgagctacgtaaatgtgggtttgttattttgaaagaacaaagaaattcttggtgtcttctgtcaccaaattacatcttcagatgactttgtcttcttgtggcactgcttttctttctccagaagggaaactgcacagttaccatgatgggaagtctggccagaggtttgaaattatcttatagacaaagccacctccgttgtccccgttgttaccctgggcaagagacaaatgtaaataacagactccagaagccgtccttgaagctatgtaccaaatccacatttttaagtgaccaagaactgggactccaagtcctttccactgcacgcttgcctagaaacagctggtggctctctgagccacgacactgtcatcaggaagggaactgtctataatgccagtgagagggaagaataggggctgggacgagtgtccaggatgtgacttctaccagcgtgtggggcttatagtagtctgagggttgtcatacaccctccaaacccagcttcactgccagcttccgctggagcagagcattaagggaatgagccatgtagagtttagtgttttatgtccaaggaaaatcaaggacagaaacctaggctgtgtgtctgggtataaaatacctggcctcctttaccttgcaagagactttcctccactgagagtcatgtggagggatcctgtgaagttcaaaggttagggtttctgccatgacataaagttatttggggataggtagttatgtattaaggtcagagaggggcgcattctgtgctctgtaaggtacagaggttaacaacaggttaacaggtttgtctctacccactagttgtcactacctggtcttagttatgacaggaaacaaacaaaacaaagcaaacgaatagtttttaaatgtcctgtggtcagaacagcagtgcctgccaccattggcagcctgaagggactgagtgaggaagctccgtggtgctgttctgtccttagcctttgtactgagcttaagaaccccttgccatgtctggaatgttctttgtaaagagcggtcacctggcattaagtttctcacaggagacagagtcacacatgaaccaatgagacccctgtcctttctcccctccttatgtctgtggccctttcctcccctccctctgtgacctcccggagggctcgttagctcttgagttccagagcccttcttccaagattccaccaggtgcccagtgtgcgtctaagggaagacagggcctgcctgctgaggggttgctcaggcagggggctgtggtgaagcagcatcttgaccaaggtgactagacccctcctgtactgtcaggacactgaaatgtctcagcctggttaccactttgagaacagactccaggggggccaagactagaggttgccactgagatgaaaccttatggcatgctttctgcctcctggaaactggctgtgattgtggagatagaacacgcatctctctcataaggaagtatttgctgagtcccatgactcagaacagactgacgctgtggcctagcaagaatgagcgtgtgtgtgtgtatgtgtgtgtgtgtgtgtgtgtgtgtgtgtgtccgtccattaaaatgtacactttgacacatttggacacaagtgcacacacccacaaaggtatcctcagtgacaataatgagcaaacctttaacctccaaaagtatactatgggttcaagtggagggaagaaatgttactagggcggggacctcagtagagtcatagagatggtgtgtcagggaagagggttacaaggacttttgtgggacaaaggggagccatgctgatcctatagggagataccctgagctgccaggtcaggttgtgacagtcagcttgaggaggtaggtgaaggctggagtgctgggccacaagcaccagctctgggggagctgttgaagcagtcagatctgctctggaatgtggtcagagcagaactttttagcattttattctttaaatccccataactacattttaggagttttccatttttgtagtaaatccaggaaaatgtagccaagtacattggctcagtgtttcatacatagaaagcagtgaaagggagaaccatagacagttaatagattttaaacagccccatgcagccagagtgtcgcacagagtgggtgtacttccgctgcacctggctgtggtgccctgcacctacacaggatcaagcctgtgatgggtttcagtaactggaaataaaaataatctaagtaaaattcagcattcaggtgccttttcagtatactcgtgtgtgtgtgtgtgtgtgtgtgtgtgtgtgtgtatacatgctctctctctttctttctctctctctctctctctctctctctctctctctctctcacacacacacacacacacacacacacacacacacagagtgatgaaattgactctgcatgtgaatataaggccagaggtcaatcagtgttgagtatacactctctacttcattttttgtgacagtgtctttactttatgaggagtttgacattttggctagagtggctctctagagagtcccctggaatccacccatcgagatgccccaaaacccaggattacagatgtgggctgctgctcctggctcttacatggatgctgtgggtctgaacttgggttctcgctcttgtacaaggaagccctttactcctgagccatctccctgtcccatgtgactcctttgaagagactaatggtaaccacttttcagttgaccagttccagtgaaaatcataggctcagctgccatagaaaccaacaactcttagatgagttgaacctttaaaatagagaagaaactaggcgccattcaaagagcagcccaagagatttgagttaagtcctcaacttctccagttatagaggctggtacctgagattttatatgtgtgtatatatgtacatatgtgtgtgtatgtacatatacatgcataagtataattttccctttttgtagttataaaaacagtctcagttcttctggataaagtaaaatgtaaggtaattgccaccattatcaccaccactgccactttgagggtgtgggagatagctcagtggcttgctgaatgagcgtgaggactggagtttgggtccacagcatctacatgaatgacggcaggtgtggtaccctgcctgtatcccaatgcttggaaggtggagatcagaagagtgagctggccaaccagccagataagttgggtagttccaggttcaggcaggcttcagtacataatgtgtagggtgaccaaagaagatgaccgatatcaacctctacctacatgcacacacacgtgcatgaccactattcacctgtgcctatgcatgtgtgaccacacacccacgtatgccacagacacacactttcagtaatgataacaataaaaaatagaattctcccttttcttttaaagtaggaagatattattgttattcttcttcagtaactttaaatatgatttattcaatgtctcttacatgacatggttgtgaattatttctaatgcttacaactctataatctgggtgatttgttttcacttagcagttgacagaatcaaggatcagatgaattgcagagtcccaggttcagacaggtctcgatatataatgtgttggctgatccaggaagatgaccaatgtcatctggcttctaggagccaggacagaacatctttctatgcttgtacctttcttcttctgcattctagttttgacagaatggctctgtttgtttatttgattttctcagtgggtgtttctcacccccatctctgggtgtattctgggacattcaagagcccggtggtggcatgggctcagttctagtgacaagggaggcatgtgatgtcctgtggtaaaagacacagcacatgcatgcaagcacgtctgtctgtctgtctgcctgtctgtctgagcagagagtgcttgtttacattttccttatcctgttaattgcttgctacctgccttggtgcagccgagctccacgcatgtggaacagtcgttcccactgaagctgcacactcatgctggggaggctcacatctttgcagtggtccagagcaggatggcacaatcatgacatctcagcctaatttagtttcttatgtaaaacaactttggtctgacatttaacatttctcccttcggtgggttttttttccccttttgtctctctgagctcattacccagcatgtctttatacctttacacacacacacacccacacacactcaccaggattcatattcatgtgcacagcaatatatgatcttcattactggggaagtgccactagctcacagaacagactaacaatggtggcaaatcctgggtccaggaaaggtagccagaagtttctattgaggttgtacattaatgaagtagaactgtgagcagcctctctcaagcaagcttcttgctgggagaatgtgtcccctgccaatcagagggacccgctgctcagggacagagccctggaggctgggcacccttcctacaaagagcaaccgcacatcatggcttcgtccaacatgctaattcattccctggcttatctgcagaggtaggcagagtcatcatctgttgtctgggaattccaggaacagcaggaatggaggctacagacttggcttttctctgttaattcttgctgagtagatccaacaacaccaagggtgagggagactctggccaatattcctctttagatcccgctcctcacttccacccgagcctccgctttaaaaatcgtcaccatcaaacccctgtggaaaatgacatggaaattcagggaagctcaaaagccataaaaggcagaaacttcttgtgggaatatgtgtttgaaggggtgaaccactctggtttccagtgtttaaagtgcccttgctcacagggtgagcaagctatggccacactctcttgaagtagaaacctcacttctccgagagagacactgcatccaaatatttggactctgatgggaacgggctgttatccttaggtctacttgacttaaagttggttatctattgattcacaaatgttcaatctcataatttaccttcagaagactcattaataaggacacctgccttggtcaagacagagcagccataaagagcacctggggagaaaggacactcagcaggaaaggtgacagggtgggagtgcaaactctaggccagggggtggtgttctcccggagtgtgaaggcaaatccccttgatctgagaagctgcctgctgggcaaaataaaacattgtattctcagggccctatggtcttttccaagcctcaagggccagttgtttatggagggagagacttcaggaacaaagtggcaagaaactgcctttgaagaacagcttaaatcttgtgcagtctgtctctagaggcctcgagagtaagaaaccaggagcaaacatcaccaggaatttgtacaacacatgctggatgctgactccagctgttgccttcatcacagacccagaggcttcggaggaacacatgcaaagcactcttggctaaaacagagcacggaatcaccttgccctcaacagtggcatcagcgtttattgctaagcaaccgatcccgaggagactgaaatacagaacagaaagcaaccaggagcatccataaacaccaccgtctgcctggccaggcttttcttgcctgagccctgcagattctgcagccctcattacaggtccctcatccattgaaaatctactaccacctgcttgctaggggccaacctcagtgaaccactaactggaatactgatccagaatttctcagctgtaatgatgatcatggagtaatggtttaagtccattctatgtaaaggtctagaaatttaggaaagagatgaaaagattagctgaggcccgagaatctattaatatcaaggcagaagcagtaaaaggagattggccacatgaggcccttcagtcaggcacaatggttatgactgggaagagttctgagcctgagagtcaaatgcttcagtgtcccttcagccagctggctgtcactgtagcaaataccagagatgaccaagttaaaattagaaaaagtattgtggtctcatggttcatacacttcatggtcagtgggctactgctctttagctctcccgggagggtatcagacagcagtgttggggaatccatgtcagagtaaacctgatcacttccccaccaggaaatgaaaggggtgggaaggggccacagtccctttcaaaggcctctccagatatcttaatgacgtctggctaggtcctgccccttaaaggccacagcagcactcttacttagctcatgagactgggggaacatttaagatgcatagagatttatttataaaaagcaaaggagagatggtcattggatgaatttgttattcagtggctttaacctagagtgcacccgtatcattcattcattccttcctttactcactcactcattcattcgcttcacaagtgttcttgtgagattcctgtgtaaaaggtagtgtgctaaacattgaaggacttaaaagccaaaggaatagtttctctttcacagctcagagtccaatggagaagtaactgtgtaattaaacacgaccaacaggcacctaggccttggaattgaagattgaaaaaggagggatgatggcatcagatgtgtattttactacaactattgtaggggtggagggaagtcatgactaggtgtgaggagaccatgtgaccaggtgaagggggggatgctaaatgcattaacatggctgtgggaatcagagagaaggctagcctggagcatggaggcagcagcacaaagaggatagacagggtgaggctttctagaaacttccatttagaaagtttggtgattggatgtgaatgaaaagcagacaaagacgattttagatttctaccctgagtagggtagctaattatgtcatttgcttagagagtgattacgggagtgaaagaagattttgggacaaagggatttagtatggagttgtcattttgaaggatggttttgaatgggtatattgcagaagctgaataggcagggacagaaaagccggaattcctagacaccgtggtaatgatgtgtatggtcattgaggccaggatcacgggggtagttacctgtgggaattaaatctcccagatatatgacccagtctaagggagtcatcagactgagagagtaccccataggttagaacaggagacacgtttctcgaaatccccctggaacaagcagcaaagcaattatggcacccaacagccacactatggagttccctttgttcctttgtagtcattacaaactgtgacagcttagatgcgtgaacgttaacttcactacctccttccttctgaggactatcaccaggtactcagacatcttttcaaattcctcttcatgtgagagatgagacaaaaaataatttttgcatattttctttgaaagataagagtactttgagctttaaaatttaggctaaaatattgcataggtgccaaaggctcgttttcatatgtgctgaagtaaaaatggaggtgataaaatcgaggttctgcctgtgtgtggtttatgctgctccaatttgatgattttctgaggtcataaggtgggtcagaggcagaacagcacacgtatctcaatgcccataagcaaggcagatgtcagactagggggctagctctctatctctggctttgctaatgtagtagttcctcttatattcatcttctgagccctcagtcctctctgtgtccatgtcaggaaaggccagcaagtatatgctgtctacagcttccttctctgtttgcttctacctccaaatgacactgactcctctctgtcttagcatatgcagaaggcaatgactattgacccttcctctttgaagtcttcagtcaatctaaaacatttatagtgtgcagaaaagccctagaaagacatgttggttcccgaatatgtctctctgcacttgttgaaacctaaggatggtactagctatcgtagggcttttgaatcaagagctgcttaagtgaagagacagctcttggttaccagccagcaactgatgactcattatccttcctcttctggagatagcagtgggtcactggcaacttcttggcagcctgagccaatatattagaaataggcccagctgtggcattagccggtttgctggctgtcttaggtctggtattggttgtaggtggaaaagagtgttaaggatctagagccctcaaagatggcttgtaactcaaagagctacagagtttcatagtgtgcctgtgttgatggatcctggagtcacctcagattagactagaggggcaggagaagggtgtggcatttgataatctagaagccaagaaggcctcctggatgtgacctcacataggacaggagttgtccatagcttcacagcttggtgtactgattggcactttggaagcttatcaatttaaaacatatcaatttgttaaatgttggaaactgagttataaatagtaacaggctgaatatagaagggattacttcagggaagggcagtaaaagtcaaagacaggggtgaaggagttttcagaatcagagttgctcatgagctctggagggcagatgtgtttctgtgtcaatcaaatttagaacctacgcctagcactccaaatccaaaataccacgaagtctgcacatgacttttcttgtagccacaggcttactgtaatatgtcttccttatgattgagttaacaatggtaatattttaggcaggtcttatgtaaccagcgtggcctggaactcactctatatctgagaatgatcttaaacagttggtccttctacctccccttcctgaatcctgaaacagaaggcttccattaccacttcaggtttatatggtgccctgggtcaaacccatggctttgggcatgtttgccaagtgccctaccaattgagttacccagcaaaagcattgaagataagcaattagaggtttcttgaagcccaggagattattagtgactggaaagcatatgctgttgactgtggagtctgttaaactgcccttctcaagagcgtgtgcagatagatgtcttctcagattatattaaactatgcagtagaatgtgggaatgacctagacaatggtggaatgaccaaaggacaaaatacctcatgagcatttaaagtaacatttgagagtggtatttgttgatggggaagttttcttatgtaatgtcatgtggcaaagcaataaactatttcgtgacatatgggggggcatataaatgccttttgaattaaatgaacatttcctataaaactgtgaaaagcccacacggatgtgttctttgactcttgaagtgaacaatcatggacaagtgagtagtcaagacggtccacagtacagcgcaggttgtatccaaaaggatctgcttttgtggtaaactgaggtgacagtctcctctagaatggccccctcaggggttctttcgggtcccacatgcttttgagctgtgattaaggactgcctggacaaagcagctgtcaccgagcaggcccccacagtgagccttgtctggtttgcaaggcttttccaggcggaacccaatcatctcagcctcccagcgctccagccactttataggccgccttgagtttctgcctcccgagccttgctcgatgctgctctgtgaagaggcctcttgatttattaatcaattaatcagtgcacaccgaggagctgctcagggtagttaaacagggaaaacaaaacgctggggtccatcacgcagacagattgtgattaggaacaaacctcccactgaccgatcttcctgcccaccatggctgcatggctgccccgagttacctttcagacatgctactccgtccagatgggcctcagatctataaaactgacactgtttttctgaagggtgatatatatatgtatttttgcatccttgaagaaaatgactccaaagatgagcctcattcattcctcataataactgttgagccttgcaaactctgccaggccccaaacatgctgtggtgggtctgttcatctgtgcatgggcagagctgtgccatcccactttccccacgagggaagaagtcctagggctgaaaggatagctcagcaaaggcagggcgcagtggctgcatgactgaggagaggttccgtgtgctgagtgccttatctaagggtacatgggactcccaaggtcataaggaaatactttcacacccatttgcatcaccagggctgtttcttcatgtaatctagtttttgtggaagttaaagcaaatgagagtcagagtgctcactacccccacttctctctcagctatgacctcagagcatgagatacaggagtgagggttgggacagaggcctcacgtcatagcccaggctaggctggagcctacagtagtcctcctcagctcctctagagctgccatttacaggtgtgagccactccacctggctgatgagttttcagtagtagttttaagtaaaacttgtgggggaagcatcttggattggtcaggaaatgagaacaacagtccagaagattgggtggggggggtggtcctcatgaggccagtgacaggtcagagtttgctggcagaggtgtgctggctgctggagcaggctggatcctggttctagaatctattggttagttttctttcctgtggtgctgacttagcacacacgctgctgaggccaaagtttggcagaatagggtctctgttcccagtcgaaagtgacacttctgtcctttgccagttctctgccaccaagaatgaggtacacacccccaccatgctggactagggagaaagcagattgtctgcaattatttagtggacataggagaatctgaaatgttccccattgactgagtggaaggaacaccatgagagtgtgttctgtttagtatctttaaggttttcagcttctaactcttgcataatgtctgccatctaatgcttttcctctggcatcttcctggtgatgtcaatcaaatagtcaaatccttgggtggcagacgtctgaactggatttaccaccatccagttacaaattgctcttttttttttcttcctgtttgtgtgttctgtaggaccctgctttctctgctgtgattcacgacaaactccaggttcccaatactatcaggaagtcgtggaatgaccgagacaaccgctgtgacatttgtgccacacacctgaaccagctaaagcaggaagccatccaaatggtgctgaccttggagcaggcagctggcagcgagcactatgacacctctctgggctcaccccctccgatctccagcattcccacactggtggggtctcgccacatgggtgggctccagcagcccagggagtgggcctttgtgcctgccccctatgccacttctacctacacaggccttgtcaacaaacacagcggcaaacccaacagccttggggtcagcaacggagcggaaaagaagagtggctccccaacccaccaggccaaggtcagcctccagatggccaccagtcccagcaatggaaacatcctcaactcggtggccattcaggctcatcaatatctagacggcacctggtccctttcaagaaccaatggggttaccctgtacccctaccaggtaagcacccctaaaatcagggaagtagagggttttcctccctggatattgaaatgaacacatactcccgatctccctctacaagtcagagtcgaggcagaggtaggctatatcttctttctccttctggaagctcctagctcagtgcttcaggcttccatgtaaccctgcagagttctcgccaagaagctccagccaggcctgcttgcttggagagactctctgtcaactaccaatcctgccaccttcttgcttagctaacatatcttctccctaggagctcatgttagttcagacaatgtcaaggacttcctagccaccagctttactgtgtagtatagtgattaagagcaaagacctaaaaatgcttgaactgggccgatcacctgtcttgtatatatactagcaaaatgacttggcacaaagggataaccctacctcaggatcaaatctctcactttggaattgatacaatagtaggaggattaagcaaaggtatgtctataagacacatagtatattgtctaggatatgatccaatattgtgcctgataataggagatttacgaattaagacaaataggtaagaacatttttaccccaagactgcactagctctctaaaattaggatttttaaaaagcaattgatgagttagtcagggcatcactaataacttagatggagtttattgatgttgtattgtttatagatgaaggtctatattggcatccaactgtcactacctgtaccttctgaaagggttggggaagaacctcttgtacctaggaggacctttactgctttctactttagtttcatatttaacatgttggaactggtcacaaaaggcttcccactcggttttctccttcctgtgaccccgcccccttcccccacttctttaggtaatgcaatgagcacatgccaccaggtctcggtattcaaaagtaagagcaggtctcaagtctgaagaaaaaaaattagttctgatctagacatggtagtgcatacctagatagaaaaatctagagtttcagactagcctggacaacagagacagttcaaagccaacctgaggtacagagtgatgccttgtctcagaaacagcaaaaaaccccaaaacacaaactaaaccaaccaagccaaaagatgagaaaaatcattagtcctgattccccagggagctttctattggaagaacatgtgtcttctgtgtcttaactgtcattgacatggaaaggtagccacagtcacggggtgttaggagtgtcactggtatatgagatagtcctgaataccttgggtcacttctcagacgtgctgtgtcatatggggtgagaagccttccattatcatatggggacccaggcttccttcatcaacagcgtccccatccttcatgggcctcaagttcctccactagattgtctgtaaccagccaagaaatggtgtgtgtgtgtgtgtaggctcccatcgtgggtttgaggcctagtctgggtatacagtgcttccattcatactctgccgtcaagaatccagtgctctagcctcacttccctgcaggagaaactgggaaagccaacccgcctgtgtgcccagaagaaaaacaaaccaattgaggttacacagagccgttttgtgacctgagaccaaaatatggggacgcataaaatgaactcaatgtgtctgatcaaatgtgaatatcttttagttccccccaaagaattttatttaatcgtgcagtgggcctagatggttagatctttttgtgatcaaggaatatgatgctcagagaaagcaagtgacctatgactacacagccagagacagacagactaacactagctctctcctcttctcctctccaacccatttcccaagtgtgttgcttccagtttccctagtttggccctgtgtgatcctgtcagcaattttcccatacatggcttcctttgagacccagaacagcaaggaaaacaaccgttattttgaccttcagggctgagcatccatttgacttttagatgaagtttgtgtggttaatctacatataccacattatatcacataactatgtatttatatactgtataaataaggaaaagaaccaataaggaaacctttaaggagactttgtagcctagtcttgaaagtcacttcatagggctgtgtgttagctttcttctctctctctctctctctctctctctctctctctctctctttctctctccctttctttctttccttttggtttttaaatttctggttattcatatcttgtctgtatttatgtatgtgagtgtgtgcttggtgcccacagaacccagaaaaggatgtcaaatctcctagaactagagttacagactgtggtaagctaaaatgggaatggagggaatcaaacctgggtcctctgtctgagcaacaggtgctcttaaccactgagccatcttccagcatctgtcgtagtgtcccatcggtataacagatataaagaacgatgcactgacagaagagaaatgtcattgtccttactgttttgaggtgtcggtctgtgatcagctggcctctgtattaattgcattccttgtcactctgactgaataactgacaaacaacttaagggggtaagttttatcttagctcatagttgaaaatgatacaggccgttatggcggggaaagcatgaagatgaaccactctgtggtagcatgcggctgggatggcttccctccttgcatcttgacagaacaggggcaaagatagaaattctggtgccaatctggttttctcttttacataaccacgttcaaaattggacttggctcctcagttaatctttcctgaaagtaagcccacagatatgcccagaggtgtatttctcctgagtttctaaacctcataggtgtggtgagacaaactatgtattacctaattgctaaaagaggatcccaaagcctgctcagggcatgctcccaatgacagaaagaccttgcattcggccctacttcttaaagattctaccatcttccagtggtgccattctaagaccaagccttatcatataggccccaggggaacaatcagttcccaaactagagctgtcaggaacagaagatgtcttctttcaaagttataagaagtaaagcatacttgttttaaaataaaatggagactgtgtggggaaaaaattaggtgtgatttctgaaagcccgtatcacatagaaacgcattatctagtcattcacaatttgtaaacttgtgaagagacccagtgctttggcttctgctttatcgcctggcgtattttcccatggtgttatttatttttctgaaatgcagtctttggggtagctcactggaaggctgctggtttagtacttgcaaggccctccttctcatatctagcaccagtatgatgtctaacgttaccatgctattctatattgaggaacatttactctatgaaggtattctaatggatctaacaagcatcactattagagtctatgttttgtgagtataaattgcacggccaggaaacagccttcctggggggtggggggagtgtttttaccatgtctctgatagtgctagctgttacacaggcaagtcccatcttaccttccacactggaagccatgagagccgtatagactcaactgctgttccattactgatgtcacaaggacaatgggttaggaccacagctgtaatagaaaatacccagggatggagatgggtgagagggacaatctacaagatgcctaaaaggaagtgtggctgttacgggtgtgttccttttgtaatatattcacaataattctcactttcttctgccccatctcagatgaaagagaattgcctgcacaagaaccagtattattattttttaaagccctttgtcatagagtaggcaccgtgctatttgttgggtgtggctgcctccttaggctaaaaacccgtgttcctgtcctgtggtcttcacagtgagggagaagccaggcatgttacacatgatgaggttggcagctaagtgcaaaagtggagtggtgcttgtccactctgagactttggaggaactggaatccagctcttgttgtagctcaaaatcagattcaaagatgacagggacaaatttccatcttggaattgtccgggatacattttattggcaatgtcagagctgaccgactcatgtgccacccaccccccaccccccgccaagtaatgattaaagggaccggaggaaatctctctgggataaagagatttggggtctggctatgaatcagtatcccacgtgttgtgactatatcgcccagatgccctgaggcgtgggctctgggtctggcagactgagtgtctcctgttgtgaacatctccctgcagtaaatattctgtagtccgcagtctagccagctcgtcagagatggttgactgctctggaagccagctgtagttcccctactcacccacactcccacttccctctgtggagcagatttcctcgggcccagagccagagtgttccttgagcagggaagcagctcgagtttaatgagtgttgagggtacggttccactcccgggaacctgagccggtggagatgttatataaagaactgtccttctgaacctcagatgcagtaagggtgatgaagaagagaccaggcttccaacagggagcctatatcctttgtgaagtgcctgcctcacaagaggaaaggggggggggaggagaataatttaggaggcagtgagaaatgataaatcacaaaggcaacttcttgcgaaatatctttgagaattcatttcagaggcaaccatgaggtgagccgtttcacagccggactttcttctattgacgtcctgacctgacactctgtgtaatgtaaatacgcacaaataagaacgtgcctgtcgactgtcctttggccatgtgagttttgacactaaaaggatatgaggatatcagccctcctgctcatctataggttaattatctccttccaaacggaagctgctttggcctgattcattctcacaacggtaaatggccacaggaaaactggtagtctcaggtggccggcattaggaatccatttctggctcctgcaccaaaggagtgagggtctgatggagacttctccttggtatcacaaactatggcgtcacaaaggccaccatttctagatggatgaaaggcaggtatttatttatctttatagatgtcccctccccataaactctgaacacaggaaaaagaatgtgtctgtgtatttggccactcatagtacatttctcaaggatgtgaaatctgggctgaaagtcgaaaggaatggtcacatcttatgaatggtggatagggtcttggtcagcaaggagttcccagactgtatcaggaggcttaaacaatgctttaaatctggtcatgcattttgtatggttgactaaggaagggccctgagaggtgttcgtgcccagctcagtctatggttgtggaaccctgattaggattttgtaggatccatgaagaatcttgaggttgtctggcattatctgagtggactcgaaggaatcacacatgtcctggtaagagtgaggcaggaggataagaaccagagaggaagagctgggaagatgccgtgctcctagccttggcctgaagaaggggccacagggcaaggaggacaggcatctgcagaagctggaaggtgaggaggcaggttttctctcagagcctccaaaggaaccagttcttcaggttgcctcagacttctccagaccattaagataatagatcagtgccggtttgttccagcggccttaaggaagcatttggtaactgacaacctgataaggacaagtgagaggaggtttgcagatgtgagagatgatgaagcatacgggctttccatcccacaccagccactacctcaccccctgggtcagcagcgcaccagcaagtgggctcatttcatttggctgcctccacagaataagaggcggctcatgctgccccattgctttccagttgtctcaaattcccctattgttacagagtcatagtaacaggcgagccacagtcgctctccactggcatccagggatgaccattgtgtaagtctctcagagtgttgaaactgcagaagccattccaggctgggggtggagagccttagctggcacacaggggtgggtgtttctcttttctatcaggcctttggaaccaaaagaacagggtctcacaggactgcttcagaaaggatttctcaccttttctggtatcttgaggattaaatgtatttgaaagacctttgggaattgtagacccaaacataagtattggctcacatcagtttttattagtaagttgaagacaggccctggagatgtaaaatagagaaatggactgtttgcttctttcaaagtggagttttcaacttctgactacacactagaatcccctgggaggggttaaaagaaattctcaaagtctaggtcacaccctggtccaacaaaatgagaatgtctgaggatgagacccaggccctgctttgaattgttgacaaggcctagcctcaaggaataattcatctgtcactggcctcataacttcctgattgcaccagtgaattcctgtaggaaagtagcacactgtgacaacatgcctgaggcaagcaccttagaagggagaaagggcttaggggatttctcacagtaaaaccatgaggacgtggggtctctccagaaggcacgcactttagctgtgcagtgcttgcctataatcttgctacagtgagataggagctagagacaggcgatccctggaagtgttcagggcagctagcctggtgcatagaggggcacacaagagaccctgtctcaaataagatgggaaatggagtatgacacccaggttgtcctctgacttccacatgtatggtatggcatgcacatgtccatactcagatgtacatttgtacacaggtacacacacatgtaccacatgtggagtgagtgagagagagagagagagagagagagagagagagagagagaagacagagacagagacagagacagagaagagggaggagggagagagatttttaacggagaaagttttattttggcttatgacttcagagtctttggcccctggttgctcaaacttttgtggtgtagcaagctgcttagttcatgatggcaagggagcagagaacagaagagaaagatgaggaggtcccaaggtcaatcatgtgccatgaccacagtgacttcacttctctcagggctccacctcttaaaggctctgccacaaatgactttgggggaaaggcagtgtattaacttcttagggttgtcataacgaataatcatcaactaggctgcttggaatgcacaatgtctatctctcttttctgggaactttgagcctaaggctacaggggagcagaaagctttccttacctcttctagaccctgttgcttctgggcctgtgctatagcaccccatctctgcctgattccacacagtttgtcccaccttctctctgttgtagggaaagacacagatcactggatttggagccttcctcagtctagtatggtctcttctcaaccttaactgaccatatctgcaaagactctatttctaaataaggatatattctggggtgtcacatggacacaaatttggggcaaattctatgtaatgattgacagagaggtagacaaatgaaaaaggaagctggggtgaggaagtgaagtagccatgggctctttcccagccaagtacacccagctgggctcccactctgtgggtagtagagaaacaaagggagcaaagattaaaaaaagacaaagccaggagaggcagggaggtgacttagtcacacccccttaggagcccagaggactccagagcagacaaaatgcaaagcaggcagccactgggggaagggtcagcaggaacacactgacccttcccgcctggtgcaagccccttccactcatctgtgctcacacagaattttacagcccacctcggggagaggagctgactagtgggtctaaactgacaatcatggaaggggcctgctctatctccactgtcctggcagacactttgagttaacttggttagagcaacttgtaggattttttttttcttctttaaaaatatacctagattctagaaagaggctggaggaaataataaggaaggtgccttgtttgcctcagcaccaaatgtgagtgggtgggatggggtgggccagtggacagagggtgttttggcttgtctgccctgatcttggctaagctaagctgggtgccaacaaaactgagcattgtcacaccgtggggactgtagttagagtggagactgtggataagcacacagacgctgtatcccttcctctttcagccatcttctccaggatgtctccagtgacagagctttcccttctttatagagtcaaggtgtttgttgtccacagtgggctggctaagtgagaatagcacagctgaggtttctttgaaggtctccaagggggctaggcatcacagatcttctctaagtgtgaaggatgaaaggctggggtcatactagacttacctctcccacacagaaacaccctccctgccctgcggccctaacctgctatggggcctccatggagccttctcactgtggagagtttgcactttctcctgggtaaagttgcagttgttgtggggatgatatgagatgaggtcccttaatgtggctctgggtgtagcacccagtagtgtccatgacacttattgaagttggaaggccatcttccttcaggcagggtcacaatctgagctgaatagacccagtgtggccctttcagtaaagaactcacggtagctgaagaaacagtacccaaaccatcaagtcggtatggaagccatagccctctgcaaagaaactagctttccaaagagcacgtcacatttcaaatgagaatctcatattttaagtagaaatgttcttcttctgccattgttgggcaaattgataaaatactgactggaagactccttctctcatgtttggaggtttttttaaggaggaggggaaacatcataaattccatggagtcatagaggaagcagatttaaaatgatccaaaagagtaaatgccctattattttggggccaatgttgaaagagccaggcttcagatatggtttatgaatctcatattaaaatgcacttagagagagagtgtttgagcccatccttcctggtttcctaattagtcactgattttagtatctttgcgttctcactcacttacaatttaataaaatataaattttcttcttaacagaactcataatgtagagttttcaataaactggagaacttacagtttccttcccagagaactcaccctggacatcctaattaatatccaatcgagatgcttctgtgctaacagtctttagcgtgacaaattagcctggttctgtcttagaaagatatttgtgaggattactaatgagtgtatttcatatgcctaagttcctcccggggagtaatttgggtgttcaggaagtatgttagacaccattttggggattgtggagactatttaatgtcttaactatagcacccatggcctcagagagttagcccatcctgtacatagctcaggtgagtgcctgggaaaaatggagacactggggaaggagcagggaaaccttatgaacagcagccatgtctgcactgatggctgtgaccagaacttgtctagtggcaggaccaatctaagacagcctggtagcttccagcatcgtggcagggctggctcctactgtggatgctgcagagaagaacaggatggaagggaggaccaggcccatcagcttgttcatacactattggttacagcaaatcacaggaaccaggcatgccctcgtgagttataggtagcatgacccagactcagatgtgttaactgacctgcccaaggtcaccttgctcgggctcagacatggcagagatggacagatgcaggtctcctataatcttgtttgcgtttctaccacttttatgaaagaaggaggccacttctgtaagttgaccacaaaggagacccaagccacccgaagcacacactattgtacgatttctttgggatgcttctctatgcaactagaaggttttccttgtgttgctctgcacaaaagtatggacataaatgcttcgtgttgatgttcttcattgcaaggtggagaggctggtggggctgaagggtgaggcagacctgggcccaaaaaattcagagaggcctcgtaagcaatgctgccatctagtgaggcgaacattagcttacctaagaggtggacttagtagaattgggtgaaaatgttttaatttcccaaggagagtgtgaggaaacaaaactctttcatcatcaattgggagaccagggtttgacagggtggcatatgtttaaattgacttttccaacaaaagtcttttggggaaagactttgttgttgcagtcttctgggggaggcagatctgcttaacacagtattctggcttgtttatctatgagctgagcaatatttgctatgcacaggggaatgatatactctggactccccaaaccttttccagcaaatatttaactgagaccctgtctagaaataggaaggggagtggagaggatgctgatattgaaggctcatgtcagagggatcctgctttcaaactccatcaccacacattggagtgggtggtgagggggaagagggagaggaagacacatttctatattatttcataatgatgtaagtttcatgttaggaatcagcttgatccagagtctctggttttgtttggctgaaagcattgggaagcctcgtgcagaatcattcttatttagctgcctagcccttggccttggttttcctctcatttctggctttgtcttgaagcatgcaaccatcatagctgtaagagctactggtctaggattcccttccctcaccactactgatatctctgaaggtaagtcaatgatatgtaaaatagctctctatgaaaatcagttaattttcttatttattaggaacttatatgaaagatttgtcgttgccccccctccccccaaaaaaaggaagccaagcagtctccttactcaaacactgctaatccttttgcttctacaaagcagctgtaaagtaaatgggaaacgagccagcatagcattgagggctaactggtatagagtcaataaatatttcctaaggaatgtaagtttctagtataatccccttgtaaacattatagacaggttgtgcttgaccccaagaccaggaagaaaatctggagcaagggttcaaggagacagagataagagcagatctgtaaacatgggctgtcatcatgagaatggggtgttgggaactggaaaagatgcagagaagaagccggaacacataaaaatagcaaatcatcgactttccctttagtactacatgtaaggctcctggtagctaagtgatgtgaagtggcaggcaggtagctatgactcggtgggttcaggggagcatggcacttgagtagacactgagagggaagaaccaattgtggatttaggagggcaatagtcacagaggcttatgggtattgcagatgtttaagaagaagtcagagaccttgaggattgatcatgggagggacaaggaggagagagatgagaacaagaccccccaggctcatttctgctgagtgttgaaaagactctgagccattcacaaatttagggaggacagaaggcccagaccagtgggcaaagctcatgtgtagacatgtgagctcttgtttattctgggacccttggtctggagacagatgtgtctgagggtctagttaggggtgaggaaggacacaggggagcctaggcatgcaagagaaagttgtaaagatggttctggaattcaggtatccctaggtgggtaagaaaggtcacagagaactctggaaagcatgtcttctggatctgattgttatctgcactgtgtggtcagtcgcctcacaccagtacccacccctaagaagtagtgttggtattctctgaccacaccatataggcttgcacatccatctatccattcagccagcattcattgggtcagttatagtaggaacacaaagtgttgtcttcagatagtgggggtaggcgaacactgcttcaagcgggtcttagtgtgggaaatcagtgctggaagagggaagttctgagtttcgtgtgtgtgtgtgtgtgtgtgtgtgtgtgtgtgtgtgtgtgtgtgtgtttgcgttcataccagtgtcctttcaggaatggcggagttatttcttgctcctagtggtaggcagaaaccgtaacctagactctgcctgattgcagcttgtgggatcaggaatccctgctgcccagctcagttgctcctgtgaagaactctgacccctgatgggatggtttatgctggcctccccttacctccaccccacacttgctgtgtcagcagtaaacacagcaaaggtcatagtgtcctactgacctggctccaggatccccctgcattgtcttcctggaaatgagctccttcttaaagcttatgtattgataagctaggcattgaacaactggggcagctaactgtggtaagctcacttgttacttactctgtcagcctctgatgctgggagaagaaaaatgggtctttctgatactcaaattcctttagtgtttcagactcacaaaataccaggtgttggcatctgggagacacagagataagtcagactgagaccctgtcttcaggagtcttggctcacgaggttctctggtgtgggaccagtgtcaatggacgagcatagttacaatgtcatagagcccggcgtgaattccactgaacaatctggaaaatgggctttagtactggttatctacctgctatgttttaggtgactttgtggatacaagaagtaatcctgaaagaaatcatcactgtagtcttgaaactacagtctccagtcaaggctctagtccacctttaaagctgtgttctgcctcccttatctgtatgcaattggatgactggggatttggcaggagaggcaagcatccaggggaaggtttacaccttctctcttgcccctctcccatctctgacagtctacactgagcatgcccagagtgcttggcttacccaccaactcctaatatgatttcagtttggagggctatgtgcccttcccccagccttgagtaggctagcccacctagggtggagtcttccaacctaggtgaagtctattatcctgccacaccttcagcttcctgcatgaagccactacctgctgagcagctgagcttgtcttcctgacaagatcctggcaaagtgatgagatcctggcaaagaggggaatgggtttccccctttatagtcagaccttagaattaagacattgagccttgatcagagaactttgtcttggctcgttatttctctcgccatccttcccactcccagctttcctttcaggaacctagtaacctgtggccgctggtggctacaggtggcacctaatgtggggtctgaatacagaaagaccaactgtgggacactgttggtggagatccacagaaaacagaagatggtatcctgaacggtggtaaacaacacacagcattaatgttagtgctataactttcatcttttgaaggctgttaattgcaaggctgcaaaaaggatacaggatagactgagtcagcgtcagccgaatgctgatatcagctaggggttaacagtggaaaatgggactggaaaattctaaacaggcatttgcctacagtcaaggactatgtcaggcaagaggagtagggcttaaaataaaataaaataaaatgagtaaaagacaaacaaaaacaacaacaaacaaaaaagggggagattctagatatacaaatgacatgagagggagagagatcaagagagaaggaaaatggatttcagagctctcccagggacagaagaaaatcagaagatgtctctggcccctacaggagacattcttctggttacatcaggttcccttccctctctatattgtctgtccttggtgcaccaatctgcccagatgtcaattttttgtctgtttttgttttgttgtttgaatgactgtttttccatgtttcatgttgaaaagaaagaatagttaaaactttatctgctggctatcaatctcttgattcagtctcagtttgcacagtggaggctgatttaagttgtcccgcacccttagccaggagtcaagcacagcaggtgaggccccgctggaaagctgcttttaaaaggcatctgcagcttcttagttctaaggcaaataagctgatagctgtttttttcctagaaagatctctgcaattgtgattattggtttcagcaaatgacaaagtgatttttctcttaaaattttagctagaaaaagtaaaaattctttgattggtctaaattgataagatttgtgtagctgcttcatttggtttctgactggtcttaaaggtataaatatgctctccatgtcttggtcatagagtattggcttatatgttattgggtatgatttaaaagtgtaacattagtaacaagaaagttagcttaaaactggtaattcagggttggagtcattttaaacaacaacacatggcatgaaccaacccaggcaaccaggcctctaaagctacttctaaattgggataatattttatgtaattcttatcctaaaaactagacttataagggataagattcaaaacaatgtctctttaatgaagcattaaaagttgcactgtcatgcattcatatataagaattggcagccaaactttgtaacgtgaaagtgatgcttttgatattgattttaaagagaatagattgtttgaaattgggttttgttttccgaaatttatggttatgctctaatattgccaaagaaacttaaaaattatggttaaaccgccagtgttccattggctgcattttacatttaaaaatattttcctattggtgtttaaaattaaaatcatacatgtacataatttaaagtgacatcacttgagaaaccttgaggtgcaagacgccccccactgtgaatacagtgggcatctcctgctttctcatgatttcttaaatatttatctcctcagcatcatgcttttctgctgactcttctcgacttgcttagatgtcgatttcttaagactttgtcactaggtttatgatgtcaaagttgttgccatggacttgggggtgtggctccgaggtagaatgcttgtctagcatatacaaagcctctagttacagccccagtaacacaaaaataaacaacagtgacaacaaaacccaacacagcccctctgttttcccagcgaacctagacactgccctttttgctgtgttgacatttgttctgatgctgcagaggaaacagagggtaaacctcctggctttattttattttatatttttagaccatgaatcaaagcagtaattataccagtcaggatattatttatcacacatttggtacatgctctttaacatttgattattctctctctctctctctctctctctctctctctctctctctctctctctgtgtgtgtgtgtatgtgtgtgttagtgatcgcacatgcaggcatgcatgcacatgacccatgatctgcacgtgggggtcagaggtcaagtttcagaaatgagtcttctcattccattctattgatcctgaggattgaactgatgtcttcaagctttgctttaagtgcctttatccactgagccttctcactagccctaggattatcttttgaaagcataattccactgaataatgtcctcaatgaaagaattaagaacattaatttgtccaatctagaaagacccattgacttgcagtatccaggcggcatgggacgattgtctaaagggaatgcatacctacttgccatctttgctagattcctttccttttttcctagaataaatttttgcctgcaagaataccagataggccgggtgtggtggcacgtgcctttaatcccagcactccggaggcagaggcaggcagatttctgactttgaggccagcctggtctacaaagtgagttccaggacagccagggctatacagagaaaccctgtctcgaaaaaccaacccacccacccccccaaaaaagaatatcagacagacaaattttaattgctcaaaactagagattttgaagagggtttcttaaacgggatgaaaggggtttctcaaatgtcctttggaacatttaaaggaaagcaaggaacacgctttggtttgttaatcataaaatgagaaccttcagttgaaagattgaaatttagaaactcgattccaccaccacaagagcccagacacttctcaaccttaaaagctttctctgtgacgattcatggtgatagcaacagatgtgacttattgatgctacatattgtaatgtgccaatctctggaagctgtttataactcaacaagtcactgttgtgcaggcaatccatgtgttagattacagatcttgtaacctaagatccatttgaagggaacataagatcctttgaaatctacaagttttagtacactggagtacttcgtttccttttaaatttatgtatttttatttatgtattaaacaaattaaatgtaaatttatttataatttcttttttattattattatgtgtgggtgcctacttgtctgtgtgtatctcacacgggtgcagtgccctcggaggctagaagagggcatagaatcctctggagtttgagttgctgtcagttctaagatgcccaatctgtgtgctaggagctgaagctgggtcctttacaagagcagcaggtccttttcatggttgagccgtttctcccaaccccaagcacacggtttctcgatacagacccagaacgttcatttcggtaaacctttaagagattggcacttgttgaactttagtgtagcatcaaagaagactgttagtgatgccattaaaggctggtaagatgtttcctcgttttctaagcagttggctggattttcttcaagtatctcaagtgaaatagcacatctggagctaggccacacaacctaagaaccataagcagtcatcaaagaaatgcatgcagttgtgggactagggagacagtatggtgcttgccatgagagccccagggcctggttttgatccttagaaggctggacgggatgttgtgtatttgtaaccttggggcaagaagctgggcttgctggccagctagtctagtctacttggtatggtccttgcctgtgagagaccctgtttcaaaaataaggtggatgtttcctgtggaccccgcccccaccataattattttcattgctacttcataactgaaagtttgctactgttatgaatcataatgtaaatctctgtgttttctgatgatcttaggtggtgcctgagaaagagttgtttgactccccctcccagggggtcgatgcagcccataggttgagaaccactgctatagaccatatattaggataagactgcacttaaccattcggtgttgcttttgtttggaagatctttccgcagtgatgttatcatagctattggtcatttgaacagtatactatgaagtgttagctaggtacactttcgatcacagggcacatcaacttcacagccagtcttttattcccttgaaagctaaaactctgttctctggagtccaagaccactcataaagccaggcatggtgacacatgcctttaatcccagcacttggatctttgtacgttcgaggccagcctggtctacagagtgagtttctggacagtcagggcatacacagagaaacctgtcttgaaacaaaacaaaacactactcctattctacaatgcttgctaatgaactgtgctaatgaaccatacctcaggggttgtttttttggagctaggttgttcagtacctaggttgtcttagtactagtgcctccatttcctgagtgctggggtttacaggtgtgcaccatcaaactcagatacatttgtgcaaggtgctttcttttgtgtgtgaggagctctgggtgtgcagttttctgtgcttatggttatttgatgcatgggatccttcatgtttgcctattgcaaaactgaccactgtcagggcttccttactccaaaaggagaaaaaaaaaccattttgacaatctttgttttgtatcgagacaacacatcttgtgaatccagcagcagatgtatttatttgaggctcctctctcggcattgttttgcttctgatgcgtcaagggcagtaacttgtatgataatcgggcatttctatgcaggcagtgctttagccagctcaatcaaaagggacattcagcaggtctggtccctgccgttctgacaaccggctttaacatgcaccaacatgcattattaattacaaaagcacatcaataaaaacactcgcaagatacaatgcacattagaattatcgaggtgatttttagatggatggtgatgctcaggcccaagaagccgattaaaccaccaaaggttttactaataaaagccagagccgtggcgccaactgtccctaactttcccactggatttccttgctttcaaagctcccttcatgaatggcttcctcagtgtctaaggatcagagatgtgctgggagactgacacaagctgacatttttttttaaaggttgcagaaatccatggcataagttctttgaagagagagtaaaatgtaagaataggttctcattttacaagagcactattttctgtgaaagggacttcagtgtgggctgtgtttgcaaggccacaggggtctggaaggctggtggagggccagggtggtgacgctttctaatctacttctggtcttttagggttcacctcatctttgcttattgatccctggctagagaaggaagtgcacaaaacaaaactttttttttttttagaaagtcttggaattttagtgatttctggtctcgaagtgtcgtaatctcacaggttttttaattattattattagatattttctttatatacatttcaaatttcaaatgctatcgttttaacctaagtgagttctgctcccagtgtataaagtcatcagatggggcctatgctgaggaagaactcggtggtagagcactcgtctggcacttgcttattggcatttttattagctgtaaacagtgatgtctttaaaagcattcttcctttaggtttcatcattgtatctttatttgcatgagggttttgcctgtgtgtttgtccctgtatctatcacgtgtgtgcctggtgcctgtggaggtcagaagggggtgtcagatcatttggaactgaagttatgggtggcttggtgcaccatgggagagctgagaaacaagcccaggtcctctgtaagaatgagctctccgcgaccaagccattgcttctgttccatgaatcttagatatgtgatgttcagtatggtggccaatagccatatgtagttactgacatctgaagtggggctggctagtcaaaagggctctgtgccataagtgatgaccacttttcaggtttcagagacttactccctggaaaagttttattggttttgcttttaaatatgattataatattgaatgtacattggatatcatgggtgagagataaggtcactgaagtgaatttcatctcttcctttgtgcttttaaatctggttactgctgtccaacagagcagcaaatgcatttgtggtacctctgtctttctgttggagagctccactctaggacaaaggaacatttaatgcagaagaagtttgtaccgcacagttttgactgaaggatggacaggacagctagcgaccgattttgatggttgttggattctggttccattaaggcccccttaatcaaacttcttgtcaatttacccctaatctttgattggaaggatcactgaatatgttttatttgcctaaaacagcacatttgtgacagatgtgtagcctggtcttcctgttggtcctctaacaagtggagtgagggctgcctctgactctgttgcctgccattaggtcctcctttctttaatcgactgcctggtagggcctcagtgggaaagaatgtgcttagtcctgctgggacttaatatcccagggtggtatggtacccaagggggcataccctcctctgagaaggggaggggatttttaagggtgggactggggctgcgatcagaggtaaagtgaaaacataaattaattaatgaaaaaaataataaaaatcaggacaactccatcttcatttcaaaactgacttacttttaatagcatttgtgcaaaaacattctatttacgtggatgggaggcctgattcacagagttcttaggaggctaacgaattgtgaaaattatccagaaacttgtgaaagaacctgtctggtcccatggagaggcatgcagggggacttaagggcccttagaagtctcagaccagctatctgcctctgtgttcacaccttccttccaataaatgaagccattggggaagataaaatatttattcctaagtgtctataactgaatttatgactataacttgctggatattattgcctgtgtaaacccatgtaactgtgcacgtaaaacatgtttttattagttcctacataaaaattttatgataatggtgaacaaaggagcaatttagtttagcagagtttgttcttattactctggcttccaatagactagctacagtgcaaacagcagcagtctgcaggggagaggggcggagctcgctgggctcatgctcctggcagtgggctgggaaggtggggaggcctcagaggggtgaggatggggagggtagccattaaatctctgcaggttgttgttgggcagccccactcctcattcgtagctgtgcagcattcagatttggcctctgaaaaggcttcataactgccactgaaagaactcccacatactgtatttcaaccagagaattacagagagaaaagggttcaagtggcttattgtgggtcatctcccactctgggatttaaacaaagcgcacacagaacaaagttcctttagctctggtgccttcatctgagtctcccctgtctgcaggacttggcaggctttctggacggagagcccacgcctctcattcccactaccgtcctttcatgcttgacccctcgaatgtggcaaaggatccctgtggtgacctggattggagggaggttcctctagaatttgaaaataaagcatcctccataaacacagccagttccttcctaatgacgagttgaaaatcgctcgtgcataatctaggtgaacacagttcctgcactgacatttagggacaggatttgacatgtgaaaatggacttggtaatagcaagatgtattttaaattgcatgaacttcggaatgaaagacaaaggattattgtaggcatataatgctgcaggctaccctagaaatggacggagaaactgggccagcgtggtgcgtgctgagttcattgtgggataagctctctctgaagcattaagttgaaggacagcccagtccctagagactgtgatgggctagactctagacatcggaagttcttaaacgttggaactctcatggtcaagatctagagatgcagcttagtcagtagggtgcttgcctagaatgtagagacccttgtattcagtacccagcatcacaaagcatggtggtgacacacacctgcaatccaagcacatggatgctagaggcaggattatcagagattaagggctatttggggatgtgtgtgtgtgtgtgtgtgtgtgtgtgagagagagagagagagagagagagagagagagagagagacagccagtaagtacacaccttgctcacaagcatgaggacctgagtttgtccccctagaacttacattagaaacaaaaccagtctatcaggttgtacacttgaaatcccagttctggataggccgaggcaggcagaaccctagggcttgcctgcctgcctgccagtctaacttacttggtaagctccaggcccgtgagagaccctatctcaaacaaacctacaaaagcaaagtgggtggctcctgaggagtgacatccaaggctgtcctctgtttctatatgcatgtccacaactctcatgtatacaagcttgcatgtgtacacaagcaaacgcatacacacaagacaacactgtcaactcacagttgaggagcacctggttcatctccctattttggtaggtgcaagtagcatcgttgtagacagatggctacatgtcctgttctcagaagtatatagagagggcagcgattctcaagcatcctaatgctgtgatcctttaatatagttcctcatgttgtggtgaccccaaacacaaaattatttttattgctacttcataactgtaattttgcttctgttataaaccataatgtaaatacctgttttccaatggtcttggtgaccctggtgaaagggggttgagcatcactgttgtgcggggagagtctacatcacctgcacagtaattgagagactgggtttccttgaagagctagtctattaggtcctttactctctatgttcccatagtagacctgtttactgactctcagatgtgtctttgtgtattttagatatatttcttagtgtccatttccccttgtcaaggacttatgtcctgcacaaagaatatcttaggtatgctcatgtgtgtgcatgtatagatgtgtacgtgtgtgtgcatcatgtgcatgcacctctttgctttgatttcattttttttttttgctgtagtcaaaacttgctaaatctttaactataaaatggacacacctgttgatttattcttgcccaatttctgtgattctgttagtgataagccttctagaaatttaaacagctcagttttcaattcttttgtcaagaagactgtttaaggtaataaagcttactccactaggttcatggacatgaccttccaaagtgaagaaattgctgtccactggggaaaggttactacaagtgggagtatctttgtctgttctgaaaatcgtagcttttggcacgggtttctttctgagatggcctggttgattccaggccttggatgtaggaactgagacctatttgtatgattaccccacatatatggaaacagcacagcctctacaattgctttctgttgaggatacggtcatggtttgtaggttggcatgggagtgagatgataggtttagttgagatattgttgctctcttagaaaagattattaaagaaataactgtttggggtcaactccagcaagactgagtttcaaatgcagtgtagtcttttaactgaggcgcggatgaatagcttttcaagtgtgtatgaaaggcaagaatccctaaagatcagctgttttaaatagcacactccagggacccaaggcttataacaaaagggtagatatggcagagatgaacccccaggtccagctctgagaatcaagtgtgctggctgggctccctgaggtgttggggaatgccaatcttgttggctctggttggttagctaggggagtctagttagatatggccacaatgtcagttggtgttgactctgacccacatacaagtggaaaacacagctgagcttgggaaaaaccatagtatacaaaatacgacaaaaaaagttacgtcttcaatgaacaggggcgaaatctgagcagaactctctaacgaaaaatccgggacactagatggaatattacagccatgatggaaaaagcagagtatttaaaaatacaacaagattagacacatttctagtcctggcttaccacacagaaaacctctttgataattttatgtggacaggagaatttgacatattagataaatttgaataaatctgaaaaagaaaaaaattaactttggaattttgttttacaagtcatgaggtccaggatttaaaaaaaaatgtttaaaaactgtattttagtgttctctatgagaatttgtaattacggaagtagagagagtatttgggcattactcaagttccaaagcgttctcaatgttacttttctcagagaaggggagggcgatgacacatataagcatatttagttaataagctaggcctgttagatggaccagtttagaaagcatcggaggccaaaggtcgtgggttcagtaacaagattaagatctgcttgattagggtcagcggccgggagcttcacagcagacaacgctgtgactgtgacatgctgtccctgacttgtaggaatggtgtgacagatacagcaagtgaccctaaactcagaggggaagagactgatccccaaactgtcagagagtgccatgagctcagccctccagctggccattttgtgtgtaggtttgtggggggaagggttagcagattggttttgagtcttaagccatttttgagaataaagatatctgagggtccctctagccaaatattccttctggcgtacctctgatttgaaccattaggatgtggcgaggttaactgactgtaatgaggtcctgcagctggaactttgtgtacaactgaaccctggcttttaaagctcacccatagacaatgttcgcttttctctgtgtatgccagagatcttcaattagttttgagctctgctctcttatgacagatttcttgacaggtgtcaatagacatataaaacttggtctagtatataagagcttttctggctcttttttttttttgattgtgcagaattttccatttcttcagttggtaaacagaaaatatgagatgaagtcaaaaccggaaccacgtagggcagtgcatcatgggtcagtcagctgaccacacgtcagtccttgttcacccgagtggtttcagtgctagtgggtaatgttattgctgttgtctcttcacaggcgtgttcataaggtttcacataaaggccactgaaaggctgagtaaggataaacttaaggatgtcattatatttttaaatgttctcgctttgtgtttcattatggcttagaccacagggcacactcagccatgttctgtcatttcattccagatataccagctcccctcactggggaaactgggctagattaggaaactgatttattcaaagcttccaattttgttccaactgagccagccccacaatagttcttcttagtccgtacagcattaactgagggtccagtgcctgccacacccttttccagacactgggatgacaataccaattccattcggtccagcctgcctctggcttgtttctggctatgatttatgctgttgtggtttctgtatctagtctccagcaactgcatgcctcatccctgcatcttctatgagctcttctctcctttctaccattttgaagagcgctcatatactcatgcatgcatgcatgcctgacattgtttcctcacttgtgcagactgcaaagttgtttttgaattgagcttgctgaccatttttcaggctacggtgggttacttacaactgagtattgtctatcctaaaaaactgtttagctctctctctctctctctctctctctctctctctctctctttctctctctctctctctctgacactgtgtgtgtgcacgcgtgtgtgcgagtgtgtatgtgtgcatgcgtgcgtgcctgttgaagttcaaggaaatgtaaggaagtaggctgctcttcagttccagctcatgatgcaccgttgctctcttgcaacaagcattgctcagatatagacaaagagcagtgacagactctggaagtcttagagatacatcctgatgacctctacagacaagaaaacatggccgattaaacataaatggaaaaggccatgatctgtattagaattaaatgctactgcagttccagctaatctaatgtgtagtctcttaatgtcgttatatgtaccctcggcagcatcactaacaaacacagccattttgcaagagttacatagggccagtattcagacatttagatctgtccagcctttgtcttccaagcctagggttattttttaggcaggagaacaacagctcagtttgtgaaatgggtctctggttttctgtgcttgtgagtcttctagtactacacggctctgagttaaactaaaaagcatgttttctggaaggaaaactgaggcagggcagtgagaatggcctctgacctgatttctcctctcctggcttctgagttcttatggtccttgatcccattttctgagacttcctgctctagctgtggctgcagccagccagcaccaagctgacagagggacacactctccctgcttcattttccaccccttatgcaaatttttattgtttgtctcttgctcagaatctatcatctcaaggatagagactgaccaaggccaatggcattcgttgctccagcgttttcccatgcggcagagttgatacccttgtcgataacagtggtgttgacaggattaaacatggtgcttttaggctggattgagatctcagcagttaggaccactggctgctttctcagaggacccaggttcaactcccagcatccacatggagctcatcattgtagctcacgttccagagatctctggaattccctcttttagactctataggcactgtgtggtgcacagacatatatggaggcatacaataattagcacacacataaaataatttaaaacaaagctgaatataccacttttttaccaccattgccaagccacactcatggtgatgatggtgcttctaaggatacctgatgccctctttccaagcctactagactcctcatcttatatgacgctaataaatcactgagacacatgattggaggttctccattaaagcattgtgatttagcatgcctgcaaagatgaactaacgtatgcctgagatagctctgtctcgatggtcttgtcctttgtcttaaggaataccgaatggcagagaagcacctgaaaaaatgctcaacatccttaatcatcagggaaatgcaaatcaaaacaaccctgagattccacctcacaccagtcagaatggctaagatcaaaaattcaggtgacagcagatgctggcgtggatgtggagaaagaggaacactcctccattgttggtgggattgcaggcttgtacaaccactatggaaatcagtctggcggttcctcagaaaactggatatagtactaccggaggatccagcaatacctctcctgggcatatatccagaagatgccccaactggtaagaaggacacatgctccactatgttcatagcagccttatttataatagccagaagctggaaggaacccagatgcccctcaacagaggaatggatacagaaaatgtggtacatctacacaatggagtactactcagctattaaaaagaatgaatttatgaaattcctagccaaatggatcgacctggagggcatcatcctgagtgaggtaacacattcacaaaggaactcacacaatatgtactcactgataagtggatattagcccaaaacctaagatacccaagatataagatacaatttcctaaacacatgaaactcaagaaaaatgaagactgaagtgtgaacactatgcccctccttagaagagggaacaaaacacccttggaaggagttacagagacaaagtttggagctgagataaaaggatggaccatgtagacactagcatatccggggatccatcccataatcagcttccaaatgctgacaccattgcatacactagcaagattatgctgaaaggaccctgatatagctgtctcttgtcagagtatgcctgggcctagcaaacatagaagtggatgctcacagtcggctattggatggatcacatggcccccaatgaaggagctagagaaagtaccaaagaagctaaagggatctgcaaccctataggtggaacaacattatgaactaaccagtaccccggagctcttgactctagctgcatatgcatcaaaagatggcctagtcggccatcactggaaagagaggcccattggacacgcaaactttatatgccccagtacaggggaacgccagggccataaaaggggagtgggtgggtaggggagagggggtgggtggctatgggggacttttggtatagcattgcaaatgtaaatgagcgaaatacctaataaaaaatggaaaaaaaaaaaaaaagagtcctttggaaaggcactgaactccggtgtcttagccggcacatgttgggagtatgaaatttaagagaagattccaaactagcagcacagctggccctgtgctttatcgtgctccccgggggtccttcaggaagcaggcaggtggccctgcccctttaccttctggcaacacaaagaataaaagtaaacagttcccaggtgctgaggggccagatgtaagccctgataacggctatcatgacttgagcctcctcctccgtttgcagagtctccccacacagagaagactgtgaaggaggtaaggctataaattaagggaaagaaaaagctgccctcgtagacttcgtgtagactcccgttgtggaattctctgttgcaagaggtcactgagtcatatgctgtggatggataattttatggccactaataaaatttatagccaaagcaagctaagataataagggtaatcaaaatgtccagccctgggatgggagattcccatcttggcctgccggggtggctgggcactggccagcacaaggaggaacttatctgtgggactcaaggccaccggaatcctagaggtgatttgtgtgcattggagcctcggagacagggccaggcatgaggcacgcttcaaatgaggtattgagtgattgtgttctgtggacagcattctataaacattaagaaatgaattgctatatttaaatgccctgaagtgaaccctaagcctaagaaatgacctgacccagctgagtttaggaccctacattctgagaagaatgttatctgagcacccaggagtactggtgagggataagggatggagaggagggtgatatttgtcttatgtatgtggaaggagtctgacaattttaatgagacagctaagttgagaggccttttccaccctgagccctcagcctgattcccttcccacctatttccccccactaagggctcagactggacataactcctgcaggctttaggcatgagctagaagggggtggggggagagaatcgtgttactttttcaatctcaccatcctataaaacatgacatggttgtgcagagacacatcagattcactggagggcagaacccctgtgttcttggctaccttctttgactctggtccacacatggtagcccatatgaccatcttcattgaatgagagagagcaaggcgtggtccctgggggaggtcaaaaggaatggactgtttggctttatgggatgttttttattgtgataaaatagccatttgccaaaaatttttaaaaaaagtagcatctgaactactttctagtccatatcaagtgtgcaccgtgtggccatcactgtgcagccttccctgacacctgtctgtagtgttcctcatccaagatggaaattatgaagccagaagacactaactccattcctctcgccttagttcctggcatccccactctccctcctgccactataactgactagataactagggtgcagaaaagagcacaaagcgtttctcacagactgtggaaggcttagatgaccatgcatgctaccacagtacctaactcctggaggtagatgcctttctgacccccatggtcagctgtctgctgtccagagcctacccgggagtctatccatatctgttcagtgttgctcatctttgggttaaggctgctgtttgatctgctcaatggcaagttcattcccctactctagactccattatagcttgtttaatcccagctacttctagtggttgaaaccctgagcagtaaccacacaggaatgtccaggccataccagtgtgcaaatgagctgtaacccatctgcatcgagacggatgtgagctgatttgtgctaactctgatcaagagtatgtattgagcaactctatgtattgacaactataagtaacaaatagcaacaaaaggcactgttgcaaaatagccaggtactgattaagagaaagtgttattagatgctattttctggggcttgggagggggctatcatgtcgttaaatgtagttaaccgaagactgaataggaagaaattgatgcctgaacctccacatacagaatagatgttgtttggaactccctgatgtcttgacgtcagggtcaagacttctgggtcattcttgacattctgggtgaagaatgctatctaagataaactccatgcggatgcccactgatatctctgagcaattctttcagggggaaaagttaaggccagtagcttacagatcctttgttctgattgtgtgctcaagaacataagccagtttaagaggctggatgtctttgggggacacgtactaggtaccttgtgctgagacatatcagtatcaaaattccagtgtgatttaaagacatgtgcctatgcctaggtcaacatagaggggaacaatgtgtggcctgtgcaaagcatcctcacaggacagtcatggcacatggattcttacctttaggaggacctgacacacacacacacacagacacacacacacacacacacacacacgagtgcgcacacacacacacgcacatgcacgcacacacactcacacacacacacacactcatgcatacacacacactcacacgcacacacacacgcacacacactcggttacatgcatcctctcctcatattcctcagtcgtttctctctctctctctctctgtcactctgtgtctcacttctaccaccctctccttctccccgtggaaaatggtggtgtttgaaaagtagaaaactctattaagcagtgacatggtcccatgtaactgagctggagagctaaatgtgggttttaatcagaaccaacccaaacatgacccgtgatgaaaaaccggttcccctggactttcagcttactttaggaactatggtgcagacagtgaaggttttctaccagattgcaggtttcgatgggaaacagccattttgtggctttggatctgagttttctcaggaacaatcatgtattttccacactgtggtgagaaaagaaatacatatgagacagtctgcaaaatcaaggtatatggagtctttcaaatcaggcatctggtccagcactgggcggtgatgctaaggcatcaggatattctttatggatgaaacagtactgtgggggatctaggggggtagggctggggggcagagctgagggtggggaaatctggagtaagttagaccagggggggaatgcaataagaaactgcactgtggtcccaggctgggtttctttacttcctacctgctttccccaggggagcactaacctctctgaccttccatttccttcttggtgatatgggtacattgtcttaggattcagtttctggacgaccctcaggactgtagtgagggcttgcagccaaccaccactacccattcatctgatccccacctgacctggacattctaggcagggctgctggacagaggtgggggagggacaggtccccaggccttagggctgtagtagctaaggctatactgaagacgcacacaacaacagccttggatatagtagcaggagaggggccctcactacaggtggcaggtcctgttagctgggaggaatgaccactgctctgacacaaactcagaagccaggagcaggatgactgcttacaaaacacaggttcctcaggaacaccatggggtgtctctgtggagatagaaggagcaggggatcctcactgatggctgatgggtaagaggacagaagccaggggtcacaggggctccttcctccagaagcatgttagaaatgacctaacctcctctgggcctggtgttgcactgttcagcctacagcaggaaaacagtggctctctcccatgcccaggcctttatttcacctggagatttgtctgagagcacatctggaagcctctctattagcacattatagatagtgtatgacacacacacatgcaccttcacaacacacacatgcatacacactctcataacacacacatgcactgtctctcacacacactcacacatacacacattctcataacatatacacacactcatatacacacacgcccatacacactcacacatgcacacccatgcactcatacacatattcacacatactctcataacacacacatgcattctctctcacacatactcacacatgcacacatattcataacacacacatacactcacactcaatgcacacacactcacacatacgcacatgcacatatatgcactcacacacatatactcacacatatacacatacactcacacacacacatgcacacatacacatacacacaaacatcacatatgtgtgtgcctttattctgagacaggatatgttctaggtttgttacatgtttctaatctatgtccagttttctggtttgcttctttcccgtgaagtgatacacatagcacagtttactttctgtgagccctcaaatctactcgatcctcagcttgttcaacacacgttggtaaccagatggactgaggaaggaaaatagaatggcttcagggcctgcattttctccatgccgtgtgaccttgttcgcatcatgtatctccttcatagctctttcctcatctgcgagctgggagcaagagccaagcctcctagatagctttgtgttgcccatctcccatgggccttgggggagggatagggcttatcagtcttagagggttacgttagataatggtgatacgtttagtatcttcagcctttctgtttaacatgtgtgcagctctgggatgggctacctccagtttagagctgaataaggaatttgtgttggacagatctttcctaactgggtcttgtcagtgggcaagtatttgtccctttgactcctgaggtaattcattcgtgactgatggtattgtatagtgataattgccaaggttgaagggagtagttcttgacagttagtgacttggggacatacaagatagctcattggtgagaagttatcagcggagccccagcactgggagcctgccttctagtacagggtgggtgagtgctggctcatctgataagcagactcctttctcataatcatttggaaacaatatgattttgattgttgagttaaaacaaccacagcttcggagagggtgcctggctcctctgaccttcagagtgataaagatgtagctggacaggtcccagaagttgaacacagccagctcccccttttactgtcagtgcagcatactgtcagctggggatgcctgtacaagttgtaaagaaagtaaatattgaagacacctgagacctgaagatgtttttgcatgtgtgtctgccgaagtacctcacgcagttaagcaccgagaacaacggaagggactcagtggaagagcgcttgccggtgcacacgcaggcatgcccagcaaaataatgagatctggaaaagaaatatatttgcttgtttaaaggactgtagatgtgagcagcagaaaataaaatagtctggatccatgtcacaaatgtgcttttgttatctctgtgtggttgtgttgatcttggtatacagtggacaagacagccctggttcactatcatgtgatatataacttgctgagcataacccaaagtctagacatggaggcaccatttaaagatttgaaagacacaaaatacatttaaaacgaaatacagcaaagggaaaggaaacattcacagaggattgggtgaaggctactcagtgatgccaccatggtgtgcaaggtgtcactgatgccacactcacttgctgacttctctcagatgtcactgtgagtgaaaaccaggtgtgtgccttcaaggtggctttggatggaaatgaggtgttgtggatttgcgagtttggttttagtcctgggtgttgtccaggagagcataaggcaccatctgtggctttagcattactaggtagtggggacaacagtgtgtgtggcagtcccttcaattgtcccctttgggatggtggcagctgttggtggtataggtagctcatagaggtaacctgtgcctaggaagagatagtagcccccatggaatacagggacaccatcctccaggccttctctgtgctgcctcctctccagctgctgtgatggggtcacatttgtttctaatgtgcagaatgaaagtaagaaagtataggttggcagaatctccactgaatgatgccgaacttcccaagttacagcaggagtttaagcaaagtttcgattcaacagtatgcaatggagcaaatggctgctctgctaaaactgagacgtataaatggttttacgtccctggtgttagcccaggctccctcatctgcctcatggccagctaccttgctcagtgaccaaggagaaaggctcctgccctgggttttattacacccgtgttttataaatgataggcatattttccacttatcatttaagagtagcagaccaaagatctttttggtttacctgaagtcatccatctttttgtttgtttatttcaactaatgtgttcccttttggacgtagattaaagttttaaagtaaccacctagcccactttagacttttatcccataaaacaccgtattatgtcagatcaacattagtgtgtctccataccacatcctcattttcccctgaagtgtgggtcttatagcagatgggagatatacagaatagactatctacgtggacttccgttacaagaacaatcacaagaaataaaaaggagacagtcttggttacacagtgagtctaaaggcagcgtatgctgcaagagaccagttctcaaacaaacaaaaatgaaaacactgtgtgttctagattttttttaatcttggtgtgataaaatgccccaacagagtcacttaaggagggtaggaaaggtttatttcaccacataactccaggttatcatccatcctagcagggaagttaaggtagccaggacttgaaacagccagtcacagcccagcccagtcatggatgcatgcacacccgtctcattgctcagttcacagttctcactcttatacagttggccccagcctatgaaacgtcacctacattcagggtgggtctccccacatcagttaacccaattaagaaaagtccccaacaggcatgatgtccataggccaacctgatctaagcaacagggtatactaagttggcagttaaaaccaaccatcataccagacgaatactttaggtaggtgtgaaggcccattcctgctgttccagctcttgggaggtccaaagggaggatcaagaattcaaggctagtcctgctacatacctagttctaggctagcttggactataagaaaccctgcctcaaaacaaacaacaaacaaacaaacaaacctaaaaataaccaagtaaccaaaacaacaacagcaaaaccaaaacaaacacaaagaaacaaagcagaaatcactcatggtcctgttaatggatcagaaggaaaatgaagtctaaaatgttttaagccctttgtgaaaaaccattggtgctgcaaggtagctgtgtctgtttttatctgcatctgcagtccacctgtcttcctacagcagaccctaaccactgttcccaagaaccctttatctgagtcccgtgttcttcattagcaggcttgcttgtgccttcagactggatctctgcctgttccccactttgcaagcactcgaagcccttcccggtgtgaagccagcattagttcatgtcacagttctgaccctgggctatgaagagcatgtagctaacaggtgacactttctcctctccaggaaggggagatgcaggtgtaatacagcctataatgtcaggggttatttcactacattattttaaatggaaacaggaagtgacctagctagcatgctgggaaatggtcacagaaaccccgtgtgcccccagataactgatggtgggtgggattaaacccaccctcttctctagacagcaacctgctggcaatgggcaggcattctgtgagccacaggtaatgagcttcatgtcattttctttgtcagatctcccagctgatgacagagaccggccgcgagggactgacagagtcagcgctcaaccgctacaatgctgacaagcctgcagccagcagtgtcccagccccacagggttcctgtgtggccagtgagacttccacagggacctcagtggccgcttccttcttcgcacggtaagagatgctcagaactttggttcttttcagtacatccagctggcgtgcatcctatgtggaccagatcagctggaaccattagaaggcattcaataccgttctttgagttggctttttgaaagcaagatttccaaactgggcactgttgtcattgtgagccagtgaactctgtgttgaggggactgtcctatgcattatagtgtgtttagcaggatctttggcctctttctactccatgcccatgaacccttctccctaccatgtcctgaaataaccagaggtgtcctggattgagaaccactgttataagaacatatggctctaaagatggccctccttggggtaagactgtaataggtgaagtcctgtggctgctgatcccatacttacctgctcatgaatctgcccccaaaaaagatactattaaagagatgttaggtgtattccttcttgacacactactggatatatagctaatcaaacactggatataaggctaatcttagagagtttaaagccaggagaaccaaaaatgaaaggtatttgaactatgttgccagtctaattttagcaacaaggcagagacagggcaggagacaaaggacagctgagtgggacagcagggttgtccaattcaatctcatgattttatggacaaggacactgaagagcgggaaggtttgtcagagttaactcataacagagacagaaatagcagggggttgatatgtctggtctcctgctcacaattcactgttcactcgatacttgagctaaaccttagaaaatcctctctaaggttctcaggctccagagtaaacaggattctgaataaataacacagagtatgaagccagagggtctggtttgaagattaaaattaggtgatgttaaattattaagaacattacagaagtttaatttcatatgggtctggccagtattttgtgtggctttccttttccctaggaacagaggcattcaggacacaaatgtaagaaggagctctgactgaggaagggaacaagccagagtaggaagagagagacagggtcctgggagaaatgccatctatagtaggtgtcaggaaagggtgttgggagcccagctctgagaggctcagtctggagcacccccccccccccggggctatctgggaacaacagcgaacttgctgcctgtttccatcacttagagagtgaggtttctgtcagcgaggggggtggaaggtgtgctgagtggctacctggtctccatgctggagggggcgagcctggcctccatgctggaggggacaagcttttgacactctttggagttgaactctcacctcctaccctgatgctcttctgagtgtgtgtcagaggattccacacaaaactgccagacactcaaagaaaacaaaacactgaagatagattggactgtggagaaagtaaggggctgggacttctggtggattctatttagggagaataggtgctgggcacctatgatgaacgggccagtgacaatggctgggagctctgtagatgatgataacagtgagcaaagactccaaaagattgctcattaccttgtctgtctgtctgtctatctgtctatctattcatctgtccatccatctatctatctatctatccatccacccatccatccatccatccatccatccatccatccatccatccatccatccatccatccctgtgtatgcatgtacatgcatgtgcatatagatcagaggataacttgtaggagttggttcctttcttccactataggggttcagggattgaactcaggttatcaggcttggtgaaagcagctaatgctcagactgctccccctggcccccttaatatctcttctgctgtgaatcctgatagcacatggagcttaatggtatgagcttaccttcacagggcttatagtgtacagaaggacagcgcaccatggaaaaagcacatgagcacactcttcgctcattccttacccgtcaccctggctcgccattgggttttgcttccttccagcaagtaaggatgcatattaacaacttgtcagtcatgggctggcacctacagcagagagagagatctattcgatagtgagagacataaccagggatctatcacttctttgggtctcagaggtctgtgaagaagtgtttatacgttcctgtagatcgttcacagtaactcgaggcccgttatcttagtctgctcatgttcatgtaacaccatgttcaagactgggtggtttataaagaacaacagattatttctttccttctagagatgggaaattcaagaccagggtactggtgcctatgtaagggctgctgtctgcttccaatgtggcgtcttgtcttcatgaggtggaagacagaagggcaagagagaccaggcttttctgagtggccttctgaaggttcagccttgtaagatcaaggcagtgatgatcaagcttcaacatgagttttggaggggacacattcaaaccattgtgattgttgaatctaagaataaaaaaaaaatattttctttctttagatagtaaacctcttagtggttacctatatttcagaattctagtctaccgttctttcagggaaagaaactttaaaaataataaaagttcaggctgtgagtgtaccttgtttgatagggtgttcacttagcttgtgtgaagctcaggagtggatcttcagcacaacataaatagggcatggagtgatagcagtagaactaaagaagaaactggtacctctgctctcaaatcggttagtaatgcattgctactgagcatgaaggccatttcaagtgtgtgaatcctttagcataaatcttacatcactgagaagagatgatgtggtagatagtatatggttagatttccccttgcgctgacttctcgctaattacatactttgctttctatcataaaaagtacacaaaacccaatggaggagaccctgtcattgaaggttgagacaatggaaatttcactgttatttgaaaagcaatgagtagatactgtatcatgcgtggagttgcctcaaaccttggaaaagaaaatgaatccttcagatggcctcatagcttcacactgagttttcaattcccaaataatccaaaaaagcatcaacaactatggagttgttttcccttcagtctgtctccttcctgtccccgtccttaaactcaatgactttccatttgaagatccagttgcactatttttttttcttgttgattaaaaatgtctgtcctgggtttgaattttctggataaactctagtgttcaatagagcattgctctctgtggttactaatcttggttgtcaacttgattggattgtgaaggtcagtagaacccacttgctggaattcacagagagtctgatgatataatgagggaaaaggaaggaggggagactgacttggaagaagctgataccgtggccacgtctttgcaggctgtatgccatctgggctcctttcccctctacccacagcttcctgtccaccagtaattgaagatcgtatacacactgccactgtcatgttctgtcaagagtacagggcaaagtctccatggattgagccctctgaaatgtgagctgagataaatcacgcctcccttgagtggcagaggattttggtcccaataagtaactgccttaggttcattttgtgggatccaagtgctttctcacttgccatccatcctgacctgttatttcataaggttgctgtcatgcccatgatgtcctctcatcagcctcccacagggccaggtcttagtgtcacatatgaatacacatcattcctctcaccttttgtcttcgttccaaatttatatttttcctagggtcattactaatgctggctctgtctaatcctcccctgttagcccttctatttttgtcttaggtggctcctctgttgcctaacagtttgatcaaattctcttgaacttgtacctggctgttatatgactgatttggccagtagtacctgaagctggagattgccattgtagtaaaccaggtctcagggtcaagggtaaactgatttttaggggactgactcctgatgtcactgctgtcaggaccatgtttcctctctgctcaatccccagtggactacatgcagccatagttacaacggtcctcaatcttattgctattatatataccattttgctgatagccaaataaaaatagctcctggttacactggccccagcaaaggatttgcacatctgatcttggataaaggaggctttcttccatccctgggtactttacacataatagtgatacctggctgtgtgctctgagtttattaagcacaagaaggatgaggaagatcatgagactgcccatagttggtccccttgttctccatcaggcatagttccctgcagggacagttgtgaaacacatcaacaaccattactgggaaaagccacctgaataccacaattggtctcaggagatgcaggagtagaaaaatggagccaggtacacacaagattcatctctcaattgctgacctatgctgtagagatagggcttcatttctgcctctggtgttactgaccagagtagctaatgtccaggattgcattttttattagatttatacctcaaaagatttaaaaaaaaaagcatcccaagacctaaaaccatacaagcaagagctgtgtaagaacctttatgagctcatattgtagaaattttctgttgttaaaattttctgttattgttttcccagttccttgtggtttccatagcagcatgatacctaccttgcctgctgactctggcagctctccttcctatgcactgtccctgccactcttccatctcgttcacttccctctactcctgactattctgcagcttcccatggaagcagggccacttaggagctccctgtgagacactggggaaagccaatgtgcacagttgtgtcacggaacagggcacccaattgtgaatgggctttaagggctaaagcactgtaggctcatggggagactctggcaagcctccagtaggggcatctttttcctaactacctgcaagtgtggcctgggctccagatgctccaatcatccagtccccttctttggcagctaatcagagccaggcaaggatcactgaaggccaaaccatcaccccatggatctctggcttatgtattcctggcaggcttaggtttactctccttagaaaaggttctgagcacttattggaaaagaaagaagtgttgctcatgaatatggatgaggtgaacttctaggagtcctggttgtatgaatatagttccacttaaactcacctcagtggcagtgtgaaaggaagactttaggaaggagccaagtgagtttctagtgcccttggatttctgaggccccaggaaacagtatcaggtgtagcttgcactaagaaatcttccccccccctgccctgattgccctgagagatggcaaaagcattgcaaacaagtagctgcatttagtgtctccactgtggagccctgtgttcaatggaatccgaagggctggagtgttggatcagtgattaagagcgtttgttgctctaccagggaacctgggtttgagtctctgcatctatataatggctcacaactctgttgctccagtcttaggggatccaatgccctcttctgacgttgggagtaacagacacaaatgtacacagacgtacacctcagaaaggaagtcatctgtacagggagtgcagaccagcagctttcaaaatccaaagggagtcagagccctttggcaatgagctcaccaaagactggctgagagaggagcatgtttgaagccatatacccatggcttcagttagtctaatacataactctaaattttcaaagtgtttttttttttcatatgttgattgagacagggtcttagtttgaggctcaggttaattttgaacttactacgcagttcaggctgactttgaacttagtatctgcctctctctactttctaagtgtatctatccattataattgtccattgccatgcctggctttgtaagtgtttcatttcttaggttttatatgcctgtctcccctgcctagcaccgggaggacaactgagcgccaccatacctgggtttacatgtgggttctaagggggcagagctcaagtgcccatgtttgcatgtaagatgagcggcatcctcagtaccaaccccaacccctgtcccagatgtttattttataatccagaaaagttcctcgataataaaggatagtaggtaggaaggaggaacatttaagaattctgtcaccactggctcttgggaggttgaagagggaggatcagaagtttaaggccaaccttagctatacatttcaagttcaaggctccatgactgcggagaaaggaattctgttaccctagagctcagctgagagtcattccacaaaggccacaaatcaaaattgtcatagcattgaccttgaaaatcaaccaaagcattaagttaaatcaaagtgaaagatggaaggtactcttttgcttgtggattgactttgggggtgacatacggcaggctgtaaaggaatgaatttggaggtgacacatggtagtctgaaaaggagtggaagcaatggtcaagtatataggagaggaagagggatgagggggaggtggagctctgttaccatcccgctacagcatgcttgcaactagttttcaatcatccacatttactcatctggaaatcatagcagcttccatggtctgaggcatccccaagttttacatcatcttcgtcatcacatctttagcttcaaaagtccccatcagttggttctaaaaccacaccatcacaggcacggaaaccattgcacagaatggtgaggtaagttggccaaggtcacacaaggtcacacagctagtgtgtggggtgtgagcccggagcctctgaaccagaatgttggctccaaaatgcagagacagtagttgcctctgctcttggctgaagtcccaggagtaaaatgaacaccaagaaatgtttgttgaatatgtcagtgactgttccctgccaccatgatgtttgttcagatagtgggagagccgtgtaatacatcaacataaagaatggatgccagagctggggaggaggctcagtttgtaaagtgcttgacttgtggtcaggaggacctaagtcaaaatccctcgttcctgaaacactgggcatgggagtgtgtacttgtaaccctagtgctagggttagtgacaggcagatcccaggggctggctggccagcatgtctaggtgcgattgtgagccccaggtccactgagaggccttgtctccaagaataagatggggaagagattggggaaaacatcttgacttctaagtccacactagcaagtgcttctgtgcaacagatacacagacacacacatgcacacacacagacatacatacctaaacatacaaacccagacaagcacatacataaacatatgcacacagacagggatgcacgcatacacacataggtatacatatacacactcatatatacatgcacacagacaaacatacatatatatacacagagagacagaaacatacatactcatacagacatacatatagacagatacaaatagacatacagacatacacagtcacacagagacacatgtgtacacacagacacatgtatacacacacagacatacacatatacaggcacacacatagacatatcgagacacacacacattcacacaaacacacatgcatacacacacagatacatacagacacatactacaaacatacacacatgtacacagacatatacaagcacgtagacacacacaagatgtatacacactcgtacatgtagacatacatgcacatgcatacacacacatacatacacatacatgtagacagacatatacacagagagataatacacacatatacacaaaacaacaacaataatagtaataataatagtaaatgccaagtttacctcaaaatctgaatgtgtttgggtgatagtgggcttgtgatctgcagatctttattctaacttctattagttactgaaataatgctttctatatcacagagcaagaatcaaaattttcagggacctcacacagtctctctgtgttctctgccccaccctccttcccaagctccctctggcttgtgcttgcttgggcacgaacctggctccctggggaagtacccatggggcccttatcctaagctttgttctatcgcttcctactgtgccttcccttgtgtctgggggtgcagcttccccagcctatgatctctatgcaaattctacttctctgtgatggtgcagccctactggccttccagtttaatatgacaggtgtctcatcctgtaccaccactcccacacaaggcctacaaagggaatcattaattaaaaacagttgaatcttggagtgtccaggttgtcttctgctgaggtgcttagacattcgtcacataggtcaagctgtgtgtttcagaggtgaatggttccttttgctgtagggcactttgggggaacttgcatcttcttctggtgtgaaagaggcatgttatgagcctgaatgtcttataaagttcagttacttaactgttcccatgagagggtgttgtaaaggaccagggaagggatgcatcctaggacaataagctcacagaagagtttcagtggcggaggtcttctgagtcacctgagcattgcagctgatcgcgctctctgtcttcctccttcagtaaacctccttgctttctgttccttgtgctgattgattattttaattctaaagctgtcttattgaagtatgtaaagcatttggggatagaatcatggggaaggcattagagaaactaaagatgtattattctgcatggcgctggatagaggctgagtgcactgataaatggcattgtggagggaaacagatccatcctgggcactgtgtgtttgtgccttcccaaggatgtggggaagcacaaatgacgggacatcaggtatgatgctgtgctttgaaataaatcacatggagtcacagagagacctgtttggtatctctgctttctcttctgtgatggcattcacaatttctctcctaaaacttctccctgagctcatgggggcaggagaagggagggcagactcacttccaccactcagatggtgctctgtgatagccagaggatcaatgtgaaaagaatgcaccatgagtgcttggaaacataggtctgtcttgcttctcagaagaatagaatatgtaaaaacaacaacaacaacaacagcaaaaccctcaagaaaactcaaaaaacaaaacaaacaacaacaacaacaaaatctcaaacctaatttatgtgggcctaagccctcgactgtgggaaagactagcgctattgatagaggtaacccagatggttaggcaggtagatgctttctgttgtaggtttctacattgtaggttgctacttctgataagtgcacatcatttttttaagcaacaggattgggtggaatgccccattggacctctttccatggtacctgatctctttgttcatgaagcacactggaatttggaagagaggatttcatgagcctagacataatagcccgtgtcattttcttggcatactccagacccagagcccacccaggctatggtctgtcccttccaaagcccagcagaggaaagaaagggccttggcagggacaagggaaggacttgtccccagacctgtgttgaaaggagattatcagcatgaggcgagcccctgtggataaaagaaaatgatgcagtataagccatcgctcagaagccagctctggccttttagatacttcagaaaaataaatgtggttcatttttctcaaataaattttcatacattattatagctgtctctctggtgctcaacctgaagtggcaaggtagtatttatgggaaaaagcaaactgttttgaaacctgattattcagaattttacagttattgtctaggtttaagagaaaacttcagttgctatatcaataccatgaacacctgggtgtttacagttctcatttttaccactgaagagctccaagaatcaggctggatgctgggagaggacttgatgacagagactcagggatttccttgtgtctaagagtctcagctggctgtgtccagcctggctgtggggccctccttctcctctctgctgctgttaccctgccccaagcattttcctcaaaggcctttcaggagctcatgagaagacccataccacatgcatacacacacacacacacacacacacacacacacacacacacacacacacactttttcctacttaactttcttatataaaacttcatatttctcatgagctaattaacgtctgtggcaatatctgagagtttccactgactactgagccctagtatttgcccacagtgtggtctagtttgtcaagtcggggtgggatggggtctagggggtgtgtaatgacttgggagcagctcctagacaagactggcagggaccagttgacataaagccacttctttgttccatatctggaataacactggtaaaaggtccttccaccacttagattttctaagtagactgacggacaagtgataccagttgtcaatcccagggatgtttccaagggaaccctgtgtaagatcctgagagtatctatcatccatccactcatctatccacccatctatccaaccatccatccatctgtccacccatccatccattcatccatctattcatcatccatatatctacctatccatccatctgtccattcatccagtcatcctttacccatctatccagcatctattattggtaggacacacggtactatcctagatacttaagaaaccaaaacagaactaggacagccaattccattaaggagatctcagcccaataagaacagctagaaacaacatacacaattaggacagagtatacagaaacatttgctattgccttacctaagcctttggtgtgcttagaagttaaaagtgtcttcccataactcacttttgtcgaaaatgatcttcttcctttattcgcttactagcctgatgcccaaatccctttcctgaatagctcattccatctttacatgctccatttctagggagaggcctgagctcctggcagcctcaaacagagtatctggggagtgcacctcggggtggcgatggtgtatgccatggaggttgccagcttcctcccctgtccactggtgaagtccatccttcacctcagaagcagtgtctcctgagcactgtggagcacatctacataaccactgcacccgaggcttcaggcctccttccagaccctgcttctttaaacctagttcttttgctcaactgtgtccttttggtggtttctagttcctttgtgtccttttggtggtttctagttcctttgttttctgtgtccactgaagactaaccctcctggccagagattgttcttcctccctgcagggtgaccagggctgatcccttcaaatagtaccaatccctcgattggcagcagtgccactaagggggggggccatgttacctggggacacagacatctgttaacagtctcagagaagtgcctgtccacagcagcctttcctctgtagaggcatggtggacttctgtagtggtagaagctacagggctggagttaggtgtggcttagtaatagaggacttgattagctagtgcaaagccctgggttctatccccagctcagcaaaatactactacttattagtaaagttgagctctggctctgtgctaaaccttgacctatcgtgtccaaagccttgatatccagctctgtaaattgtatgttcttgtcattattattatttttttttgtgctggtagacatcctggagtcagtcccaagctgccaagtttcagaaggaagcacacagcgtttgctgtgctctatcactcccctattgaagcctgaggaggccactcctgactttatttcttagaagtcactctggctgttgaggtgacacctgctggtcctcaggtagaatttatctcagaccctctgggcttaaccagtcttctagacctcattcctcacatcctctccttgacagtggtagcccaaccctcaagccgtttgagtaagttgtgtatctcctattgcacactccttgagatgatgagcgtttggttttggcttttatagtagagacagagagcataagactagatgccatgcctctttctgcctctctgtggtaccgactgccaaccgcagtcccagatacctgttgtggatttactactttgcatgttctctgtttccgttcaacataggccatgaagaggcctgatttatggagctatgtggttgagggtgggagcagggaagcaaagggctgttccagctgcagtaaatttaagcatcactggtatttctttacacatctggaggggttcctggcgagtgagtgtattgccacaggagctcataaattaaaaataacaagactatttcctttacacctggagcttcaaaattaccacccgttatattctgtgatggccctttcacaaaagaggcattgagggcgacagcctaaacatggtctctggccatagctctaaatacaagtaactattcactccaggtcttttgacctttgctttaaaaaaaaattactggaagataaggaaagtcattacatgaagcatagactgggaatttaatctgctttttttgtccatctctctccctccttcctcttttatgatgtttcatccttctccatttttgctcaggagttttacacaaaatttaaaacaggtctaagagcagcagagacaaagccatccatccagggacttccttcttcattctctgttataagccataagttccactctgtttgcagatgatacgagcccggtgggctggtggtggcactttgattggcacctgtgtaccagagctgatcttagagaactcctgtttcctccccttcctaggggattctctgtctcctgggtcagctgtgctctgctctgccctagagcacaaaactgagatggtccgcaggacacagaaacaactttatttttactttttcatcttgtccttttagaactatgttgacatttttgggaaaatgcacaaagggtgggaggctatgcttttaggcaaggcttttaagtatgttatagcagaagcaatcagactggattttaccaccatgccaccaacagcattgactggagagacacagtggtgtacgctaagatatgcatggatgttgatagagaataagtcataaaaatcaaaacctggaagccttgcaaatgttctctgacagataagtaaataagcaaaacatgagatgttttatacagcaggatacccttcaaatgttcagactgttgctacttgtgataatttacgtggatctcagaataatcatgtgactgaaaataaaccaggctccctgctaaaaccagaacactcctcatcatgtgatttcatctgttatagaattataaacaacataaactaatttagtgacacaaagtgcttttgggtatggtagtcacttctctaacctcagtgctgaggagccgagagaccccggccaggccatctagccaaaacagtgagctccaagttcaatgagagatcctgctcaagaaacaaagtgaagagccagagagggggtaatgctggcatcaacctctggcctttacatgtgtagacatgcacacacacacacacacacacacacacacacacacacacacacactgaaaagtatttgagaaggtgagaaaattgtcttagagtgaacaaagtttgggacaaacggtcatttccttaggaaggaaagcataaataccaagaatcccacggaaggcacggaattggctcaaccacacagccccaaacaattaagggggaaagctccaaacttggagttatatttttccaggaaataaaaaaatcatcactcgggagacagatttctgagttcaaggctggcctggtctacagagtgagttccaggacagccagggctatacagagaaaccctgtctcaaaaaaaccaaataaataaataaataaataaataaataaataaataaaatcagggctgaatagtctgggagaaatgagtagaagagattacataagagaggagaaacagctaaggcaaaatgtgtgtgtgtgtgtgtgtgtgtgtgtgtgtgtgcacattcacatgcgcatgcgtacacatttttgtctagacagaggccatgcatgctcttgtgggatagccctgtgtttgtggatacatgtaaagtcagtggatgacctcagctattttttcacatgagccttctgccttttgtttgagacaaggatgctcatcagctggaactctgccaagctgtctagctggctggccagcacactattacaagcgtgtactacctgtctacctttatacctgggttctgggggatccttaggcaagtaattgactgactgagcatttccccatctctaatcattcttttgaggtgattgcccctgagatatttcccaactgaggagatgaactaaagacggagtcactagaatttcatttgatagttatgatctgcaagctttgttggacattatcatggagagtattggaaacagagtaaagcagaaaagtatcatcttacctttgcacaaaataaaatttaaacctgggagattgtggtggtttgaatgggaatggccctatagggtcatgtgtttgaatgcttggttgatggaactgtttgagaaggattaaggggtgtgaccttattggagaagatgtgccactggggcagggtttgaggtctcataagctcatgttattcccaattctctctctgcttgtggttgtggataagattacagctctcagctactgctcccgttccagtgctatgcctgcttgcctgcctgctgccatgctccccatcatgacggccatgggctcaccctctgaaactgtaagccccaaagaaactcttcattaataagttgccttggtcatggtgctttgtcacagcaatggaaaagcaactaaggcaaagatcttaagtattatcaacaccttgaaacataaataataatgggctgtgaatgcagcttaatagttaacccaaggccctgggttcaatcaccaagacagaaaaataaattaattaacaaaggaagtaaaataccatcgaggagtgtgaattgaaataataaagacttgtgctaaagatcctacaagagataatgactgattagaacttcctggttgtagaaagttaggatgttacaaatggacagccatgttatcttacgttatcgttagccttcttaatggacgtttattctctatgtctgtatccgacatcctgttggagttaaaatgcaaaagaaggaaagagacaacattaataaaaataaacccctagaatacatccaccttgtgaaccactagcttccacttccaccaacccagcagctgagaacagcatctgagatctatgccagagaagtccctgctctactgttaactgctggcctgagaaccccaacaaagtatttggaaaacaccctgtgatttatgactctccattctgtaacttaaaaaatgtcatgaaaccatctccatgttggaccatgttatttgggctatggtccattctaaatggtccagtaaacgactctctcattccccttgaggtgagagctacagcaggtacaggagtcggagaacaggcagttaaactaatgcctcagtctggatgacaggatctagggggagctgagcagctcatttgacagttggatagattattcagtaaatcttgggtttatctcttaagcccagaagaagctgcactggggaaaaacaaaaagcaagcagttttccacaccttaagacacagcagcaactgtgaatataaatatgtaggtccaggtgaatttacagacagcaggctgataggctgcttctagacaaaggaggcatttgggaacaagtccccagtcaagtccatgaatggtcatagtatgacgtgacatcttaggaagagagtgacttctcagcccagtgcactaggaatccagtccagtatgatggcagtccttgtttggtcctgacatcttttaaagcatttacaaaatggctaccttatcctggacatttttctcaagcaacaaatcccttgaggtaaatgcttgaagctggctgaaagcagacaaggattgagaaactccttgggcttgccatactcatcctgactcctcccaggagacagggcagtgggtaggatggtagagagtaaactctgacatcccaggactctgcggtgaacgtcagtgtggcatatgtctggcagttccctcagcacctggattgtttcatgcccataggaggtgagactagacagtgacaataaaaatcaatgtagccatcccccaaagacagataacagcctgacattgcttgatggcttcctgtacaatcccaaagtgctactctgggactgcaaactccagccatcttcatggtgagagcccagagaacaaagatagtaactcccactgcattcgagaggaccaagggacagggagacgattctggcctgtgtgtatcaccagaaagtagtgccagcttcatgttgggaagtgaagagacaggatgcctggggccctctcagcacaggagtagaaggtctgtgttggaaaagagtctagttgagagaaaagaaagcactcttttcccagatgtcggcacctcagccacaactaaacaagcctctttgtctgtggctggcatcttgtttgatgtgatcctgtagttttctgatgctctgtgaccaccagggcatccttctcctttcttgccccgccctgagtcatctaccagcttcccccacacagaggttccaatcctctcagctaacaagtgtgtgactccaaccttaacgagcaaacagacagactccagagaggaacaggagtaggacattcctatacttctatgttgagatggataaccaaagctaaccacaccagcagaaggtgagcaacacattaaacagaggggaaaggataataaaatatcgcctgctgtttaacaatcgccgggtggaaacattccgggaactgtgcagctgccgcacttgatggctcataaagcccctgtaacgtccgtcaagggccttttttcttggtgaggggccatttttttccatgcagttatgatagcatctggttcctgtccctagaagtacagggaatccacaggctcgggcagtggctgccaggggaagaactgggctgcagaggcatctggctccttggatgactttgggggtcacttctgacctaaagggcattatcacaaaaatgcagattaggattcagtgggaagtcactgtcacctgttgtgtgctaggaaggcactgggtagtttagctcgtgtatcccctctactgtgaggtcgccattctcatcactgcaaaatcagtgtcccaggctgggtaaaggacacagttaggccacactgttaacaagtgacaggctgagttccaagtggcgaataagtgtaaactgctcgaactatgtcacatcttgctgtgtcatctttctgcgaagatggagggtacatggcatatggaaaaaaaaaaagtctctgcatttgcttagcctacctgggtacctgggtagatgtgttgaaaagagtatttttcctgaataatagacatcagtggtggcagccctaagcatgcgctggtttccattgggttccccagacctacacccagaagtaaggatgcctatggaataagaatgtggtccctagggtgtgtgagaacattaaatgggaaataaaaatagaagaagaaaaaagaagccagagactgagacagttctagataaatctggtagtgggtggcatctgctccagcctgactctacttgggaaccctcaggggtatacagagttgtcctgacctggggacagacatgaagggggggggctcgctgtcccctcctggctgttaagctctgtggctgctgtagtaaggaggacgtgatcataaatccagctctcaggcagagcagcctccagcagcccagggcaggctttgcagaagaggtataggaagcaaaagcatgtttgagaggggaatgcaggggtctgggctgggcgaggccaccgttacccaccactgcctgcccctggcacccgtctggcaggaagcaagccagcaatacccaggactgaaaagcaacctgtgacgtagttcaagcagtttacacttagccctgtgtagcttaccagtgaatgagagttagactgtggttattttatttggttttgacaattgctgggggtaaccccaatctattattgtaactgctgatctggctaagtcctaagatgtataccccaaatacttgctggtttttctggctgtgtgttcctggtctgtctcctctcatgggagcttcctcttccctccttgtcctgccttctcttcttcctctgtaacctccaaccaggtaactcaaaactccctctaatccctccgtaattgggctgtgccatttctatttaaacaatggttttaaataaaggaacaaagtttgcacaacaagagctggtaaaggtaaaaatttactcttaggcaactagatcttccggtacataatttagcattacaatacacaacaacagaccagagctcaacactggggtttctacccaactcacgtgtatccacagaaagagtgctggtcttcctggattcgaatccaggaagtcagccaagtgcaggtatctcagtttcaagccaggtcactgtgcagtagttcatcaggttacttcaggttactttatgtcataaggtctaacagtataatgccgacttccacttcttgagaatcaaaggaagttatctctaggcaaagttccaggtttttgttacaaagtggaaaaccaaaaaagggaaaatgaaaagtgagggatcgcccaggatagggctctcctatctgaacccttgctgtgtggtgaagcaacgcagcttccagaattcacacacacctctctccaaagccaatagcagcatgcagcagaatcctagagcatgtgaatccacagaaaccatctctcctgtttaaacagtgtcgactttattatggggcatgggtcctagcaggatacaagcaccacactcctatgtaatttgcagcagaacatggcctgtccttggtttattgcatattatcttgtccctcaacatgcagggccctagaaccaagcatgtgatatggttttaatgctgtggcttagcagaggcaaggacagatatttgtttccttgagctggtggatggagtgtggggtgtcttccagcatcctcagcctggacactacaatagaggaagccttcataataaattaaaaaggtataaaatattaagatgtttcttaataacaatggagtttcgtcttcttaagtgttcctgtcctgtagagtttggtactaaagtcctggcagatttaaagctatgatagtgagaattgcttcacagtaatggcaacagaagtgggaggaacagagaagaacagatgcagagctgccacgggccagtgactctgacactgaggcgcacctagagagactcttcatttttcaatgcgtatttggaattttccatagtagcaagtaaaatagatcataagcctagtttgctctcagagattccttcagaagactgtctggaggtcttgcccactggtccctgactgtccttcatgttttgtctggttcctaaaatatttctgccacagagctcagatcttagggccactataaaaatactggagggtgatctataaaggacacacttatttcatatagatctggattctaggaattctaggtccagtggtccacatctggtgaagaccttatacatttccggatcatagcatgtcaacagcatcaactgagctaggacaggcagcaggcagcaggcagcaagcaggcagcaggtggcaggtagcaggcagcaggcagcgggcaggagcataagatgctcctgttatcaggaaaccatgcttggaacagttaactcacaactcagtcttgcaataacagtgctagtctatttactagggcagagctctgatgccctgattcccccttaatggtcctgattctccaatatgatagagggacttggggagcacatgcaaatcctaacagatgactcccagcctgtggcccccacctctgctgttactctactatcatcccagaaccccactcttccagtcttaaagctccccaatttacaaccgaagagcgttgtaatcccattaggcttcctcccatacttcttgcaaaattacttgtgatatgagagacagggttcctttgagcaggacagcatttatttctattgccccgacctcatcacgccgccttgcacagacagagctctttaggtagacactgggtctgcttgtttctcagaaggttttatagtgctactcaagagaagtaaatggaagggagcaaaaggtaggaagtggagatttagtctcaagtgcaaccttggatgtagactagccatgtggggcaccagaccaggaatgggctcagaaaggcactatgcctgtagctgcagagtcctagttcccaagggggcatttatccaggaggctcacctccttttggtaattatggaggctctggaggttaaataggaaaaccctaaattgcaactgctatacttgagagtaagctttaaaaaaatactaaaaacaagcaaacactgcccccccccaaaaaaaacctatcatctagaaactcatatgaatagtagtatgtctcatggggaattctccctgaagaagtgtctgatagaactaaaggctcttccctctcccagtttgcaaaggattaactccagcccctctcatttcttacaggccaattgctactggtgtccctgtggtgtgcccacagatggtgcagtgggtcctggaagggaaaagaaagttatgttattcagggaagaaaatggaatcttccctcacatttggagactatgtttcttacctttagcccgtggtctctatgataagggccatcttccacaaactctatgaactcctgggatatagttaggttgactatcaatactatcgattgattgacagtggtagattggtactctactttgcagatgttagccctgcttcagtattagctttgtctgtttgcttatcactgtgaggagggcaggtcttgatggtgtccttgctgacccagcgctgcactgtgacagctcctgtgttctatgtttgctgcagaaaatcactgagtggttagcgctgaggagcacatgggtggtattatagttttaacttttcagattaagtcagcactgcagggcttttgttttgttttgttttgttttgttttgttttgttttgtttgtttgtttaaagcatccacagagcgagtaagaattgagcaccaggaggagaaatcagagttcttatacttacacctgtccccaaactcctgtgttggaggcttaattcccaatgcttgtagtacccaaacgtgaggcttgtaggaagtaattagactaggaggactctactcacagaggcatgactgatgtccttctaaaagagccctgagggagtccgtccttctagcctatcatgtgaggatatgtagaaggcaccatccatccatgggcttgagcctgctggtgtctcgattgcttgtcttcctagtctatggaactgtgagcaaagatttctgttctttataaacaacttcatttaaagcattttgctatagcatcaagagcagactaagacagagactgatcatgttaggaaggcattaagataggtcttgaggtgtggctgatgctcaaaggactggaggggatgttggagtttcttccttagtgtaaatgtcataaaaacatctcatgactcttagtttggtctggaatttaatagctatactttagttataggcttagagtcacaacctagggttaaggtagagttttatattatatagagctacattgaattttaatactattgtgatatatatatatatatatatatatatatatatatatatatatatatatatatgaatgatatatatcatacctgtagagcccagatgtgtggtttgacctttaactagacttggaaaattgtgatattttgttttcttgtaggccaggctgactattcacagtatagccaagactattttaaaaccccattccctaactttaactcctggtctccctgcctacagatcccaaatattggggttatgggcatgtaccaacacatctggctagcctcgtgatgcttaaagtcttcgcatccagtagccattacaagcttgggcagtagaaaatgtaaccagggcattcctggagaagagaatatgccaggaccccaaaacaaaaatctactgagcacatctgaaccacggggctgattctgttgcattggcccataaggccagagcagcagcatgtggtctgaaggagcatagaagcagacactctgccatgctaccagaaaggggccagcatctgcagctgccatcagccatgagggaccgcactcgggatgagttctaaatccctgcagactgatgtcacacagaagcgatttacacaggctgaggacagcagggtggaaaaaaggggaaaacgcaaaaaaaaaaaaaaaacaaccaaccaaccaacaaacaaacaaacaccccagacgtttttaaaaaccaaggagagctatctacaaggccagaggctagctgggcataccccaacaggaaacacatttccccaataatcttgttgcatggggtctttggatggcttacctttgaatcgcttctgtttatggagtctcagcaatgcctttcactgtcaggaaacctttctcttttcagacctagtcctcatggctagctagctctggagctctaaggccccagattaatcgcctcctctctggctgacttacacttccatcttgtgctgtccagcagaagaattactggggacaaggtcacggatgcactcagcattggctagtccagagccctttacactggacgtaaagggaggcagaaattataactttcccatctcaggctggattatggaattttgtagtgaagatactgctaaaacctttggttgatgaggagataaaatagccttgatatgtgtctgctagagggaaacatacatttccagtgacagtttgcatggaggatgttcacctcctataacatgcatctatcgttcacgcgttatcttatgcactcactgttggtgcttgcagctaatgggttcatcgcaaagtggggttaccgtacatggaatccgtttttattctcaaatgtagaaaagatgtctggctaccatggttgtgttgttgctgatgagagggagaaatataccaggatggtccaatgggtatgtgttttgccttgcgcaacaccaacagtacagtacaaaatacagctggcatgtgtctggatagagtgtggcagacttctctctttctgccggactgctgcgggccgtcagttgctccctgcagttggtattttgggtggtcattttctctcgttgttttcatggttccatctgtaagttgctttccctagctagcttcagaggcagaaggagaggcggaggagaatgagtgttacaaaataacaaaacccaaagcgacatcatgtgggtatgaagtttgaatgaaactttacgataaagcacgggctcctaagcttttttttttttttttttttttttttttgctagatttggacagcttgagtaaattttcctgtcactccttctgtattatcatatgttctggtgaaaaggaatacggttttgcatttacagagtaaatcattttgacctgtttaaaaccgttttcccagtttttctgtttactacctgactgagcttagctttagctctgttgtttctttactcgtctttcttttggattgtaccgttcttttctgtagcatttggaacctgagatctaatgcatcctttaaattgctattaatatttaggctgcaattttttttattactgaccatgttagttgcagtttatagattctgatatgtagtgtttccttaacattttggtggtattctctttttttactcaatatcatccgtatcttaaaaaaaaaaaaaaaaaagaatacatttccaagggaagagggtccctgtctccctgtgctagggcctccctcatccatgttagggaacattttctttcattgagttatagcctagaagagcctttttgttattttgcttttaaacctttctagtttaattgcattgtgatcagataatattgtatcaattcatttattcattatttatgtgtatatacacaatgtatgtatttctgtgtgtgcataattgtgtgtgtgtggggggggatatgtgtgtgcacacatgtgcatatgtaggcaccgtggtgcctgtgtggagatcagagagcagcctcagccatcagtcctcatgacatcctatgtttgagatagggtctcttggtggttctttctctgggtttgctaggtactctgtcccgtgagcttccaggagtttcttgactctgccccctacctctctctaggaacactgggatcacagatgcacctccatgtccacctttttttgtgggttctgaggcagatggaagccttcacacatgcagtgagcactttaaatcctaatgcagtctccttggcccatgctgctgctgctgctgcttctccctctccctctccctctccctctccctctccctctccctctccctctccctctccctctccctctccctctccctctccctctccctctccctctccctctccctcttcctctcctcctcctccctcttctcctccccctcttcctcctcctccttcttcttcttatttcacatagcatgtagaggttttctctgtgatttaatgagtggtaagatagtatgaattgcagtagagaatatgcatgctctgccatctagttgcaaagtatagtgtagatttagacctctttattttaaaaggacatatttatcatgatcagctacataaaataaactttatgacattgggagttttaagtgtacaactcagtgtcattagttatattcacagtgctctacagctgccattgctatctgcttccaaaactttcatcactgcaagtggctactttgtaaccaatgagcaacaagtaaatctccatctgcctattgacctctggtttatcttctgtctctaggatttgcctattctggacttgtcatgtaagcagagtcaaacagcatgtgtccctttcatggctggcttagctggctatgttgacacaatgttcttaaggtttgccaatacagtggcatgtgttagaattcaatccctctttatgcctgaagaatgcttctgtgtgtgcacatgccgcactctggttatccactcttctgctcctggacctttgggttaatttcttttctggcgccattgctgaagaaagtgtgacggacatgagcaggtaaagcatctctttgggtctctgtgtcaactttttttgcctctgcacctctgggtggaattgttgagctccgtggcaggcaattgcacatgcagccttctgaggaactgcactctgcacccatgctttccatggcaaccacacaattttgcgtttctcccaggatgacgcgagggctcctggttgtttgttttgttttgtttttttccagcctcactatttgtttttcttttaaaatgacaacaattctagtgggtgtgagattgtataatgtgttttttaaatttgcatttccctaatagttaatgatgttgatcaactcttcatgtacatatagaatgcttgattatcttctttgggaaaaaatgtcagttcaaatccctgttctgttttctaagctttcttttgctgttgagtttagaatctctgtagaaactctggatattaagcctgatttgcagatactttgggcgttctttaggttgtcttttatttctcttctaataatcctttgggggcacccaagcctttacttttgatgaagttcaatgatctatttttttttgtaaacttatttatttatacatatgagtgcactgtcactgtcttcagacacaccagaagagggcatcagatcccattacagatggttgtgagccaccatgtggttgctgggaattggactcaggacctctggaagagcagtcagtactcctaacagatgagccatctctccagccctgatctgctttcttagctgttgttgctcatacctggaacattcaacctaagagtccatgccaagtcctatattcgattcgatctatatttttcctaagagttttatagactcagcttttatatttagttatttatcgttctgagtgaattttttggatggtgtgaagagtcagctgcattcttttgcatatacaaatccagcacaccagaaaaatctgtgattgatcttgatgtactcgggcctcttagagccatgctaaactgtttgggagcctgagataaaaggaaaaatcagtggtggtttttgtgtcttcagatgggatttcaagatagacatcacatggaacgatgtgtttactgagggttttgttttgttttgttttgttttttgtttactgagttttttacacctctttcagttgtacatgtaagacacagacctggcccttccatcccagccccagccataggaaaaggctctggctagtgtttctctcccccagctctatcgtttttctttttctttcactctaactttttttgaagcagctactatacaaatatatatatatatatgtatatatatatatagatagatagatatgcgccatttaaaatataggtgttataattttgctatgaaatgtgactttcagggttgcactatcttttatcttgtttaacgtttgggggctggattttactttgctataaggatcatagaccagaggtgaaaacccgaggtcctgtccactctctagtttgtatttgatgagtatgaagctcatcaactttagcaacagtcaaaattactgtggtcacaaagttaaaaacaaattactccacttcttagttctgactcagtcacagcctccttgaatggtaacattttcaaactgggcaaatatcctcaacatgttcaagtagggataggctacaaacccagccaagagcttacatgttcaggtccaggtaagctttgggaaaaagatggtacctcctaggatttaaagtgacccttggctgaatacatctcatacagatttggaagatgtaagttggaggaaggccagttggctgaggaggaggattcaacttattttccataatttgagatgtttttagtaagattctgagttccttttaactgccataagttctatgagtgaaggccgtattttattgctctataaaatatagagtctctttacagtttgttcttgggattcttgctataactctataccctagtttcctaagttcagcactcactgaggatgcctgaaaccttggacggagtacattatttcctatacacacatcataatttaatttataaattaagcatggcaagtgcctactaataattgataattacatgtagatatatagttattacagtatactataataaaagttgcacagatgtggtctttttctccaagtatcttgctcaacagcactcacccttctcggggtgatgtgataataacccaatgcccatacgatgataagaggaagtcaatgctgcaggccttctgggtatcatctggagaaagggcagaaggacagttcatagcccaggaaggatgatgggaaatgacatgatattttatcatgctgctcagaacatgatgcaatttaaaactttcacgtggagtacttctgaaatttttggtttactatttaagagctgcggtcgatcataggtattgaaactggattaaagggactattatgttaatcagcctgggtgcattcaagcagttgggctgtacttgaggctacagtcttagttttcctctcaacagttctcgcatctgtgtttgagcatctagggaagtgaagctgaagaagtggaaatcaaacccggctggggtttggcctcacctgcccctccccagtgcattcctgcttctcactgcacgttgacttccgtgaacagggaagagaagggcacaagctggcccagaaagtctccttcctttgtttccctctgaggtgctcaaaagcatcaataacagtgtgggaaagccctggctgaacagaacttcgcaggtcccccttgataccttccactgggagcctccacacaatgccttagaaagcgctctgtcagccaactgctgcttcaggcaagcgtggaggtagcctctgaggagtcctcggtgggaaagacctgccctgccccagaaactgccctagttctcagccagcaggctcctctgcaggagagaagcacccctcaggttttgatttccttttccctctcccttctgtccttaggaccagggaaactctcagcggggcttggctttctaacaagcatcaatgcctaggtagctcacgttcccttggtagagacaaagtctctgcgttaggagttgcttagctgtgccttccatttgaggttaagaaaaaaagagatgctggatatttagatctgtctacttgtttctgttatcttgagctgaggctggcctccgactcattatgtaacccaggctggccttagatttttgttttttgttttttaatacttatgcttccacttcccaagagctggcgttacacgtgcagttcttgtcaatcagcctgctgccatggagccttttgtcacccggctgccctaggctggctccagatcatatttacactaatatcctacctctcaatagtgcctgttggttgattttaattgagtagaattagtcctgagccattggttgattttaattgaatagaattagtcctgagccatcgagataagaagaccataggacatcagcatttacagttgcagcacgagcaaatgcttgaagtgtggtacccagaggagacttttctctatacgggagagaagcctggctggatacagagggcggtggagaggacagatattgtttacaaaacagtgttcagcatatgagttaaatagaccccaggagtgaagcagagagtgtatattgtccagaatactgtagttaggcagacctatcccaacaggacccaacagcctgcaagccttggtatgtttctctgggcttcctttagcttacaatggcccacttggggtgacagccacccagtgctggtgtgatcttcacttcccatctctgtaagggacttgagcacctgtggagtgggagtatccagggagttctgggaacccgtggtgggtgtgtgggcgggtgacagcatacatcgtttacagcatccagtttacccgagcagaatattctcagctgatgttttttgtttttttcttgaatgtttgcccatgtcattttatatgaacggaaaaacaaacccaaacgagcctctggttatcccattacatcataacatcttatttaatgactaccctgttgtatatttaagtgactcgctatgataaagctctttctctgagtatccttgcatgagaagtcccatgcatgtccctgtttgctgtcttcacctgtaagtctagcaggaaaatctttggggctgctgctattgttaagctgtttggggcagagggccacactctgcccgggtgctgagtactcagtcccctggatttgtaccaagactgagtgttacctttgccctttgatagcttaaaattgtataacgtttgaaaattcccccacgtttcctttggttagtggtttctgctaaagttttttgtttcttttctttcatactcttcttggagtatttggggggttttcctagtttctaaagaactccattatgttatttttaaagtatgaactgagttacccaaaatattttaatttttaatgaaactgcagtggccaagctccttttataatataaccccattatcgtttcccaaccctggcatggggctgtgcacactcaggggactacataaatgcttttaaatgagagaacgatccattatctaaatatgccattgatgtacagggttggttcgtaaagtaacacgagaatttttttcttgaccattaggaattataataaggaaaacttttataatgaattgctctagggagggaagctgcaaggtaaacagcgtgtcatatctgtggcctcagactgcagctcatcacagaggacagatgttctcaaccaaagcaaaagtaggcactgactgtgcccgacactcctgcaacctcacaacccagatggctgaggcagggagatcatgattctgaggttggggccgcagactgagattccacatcaaaacagacaaggaaacaacaacaaaaccaatagtacagctcagatgctttttcaagtcaagcagtagtttatacatacaaactgtgactagaagaagaaagcttagaagtcataaggtccccactcatcaatcatttcctaaggaaataagacagcagtatggttgaggcctctgcagaccttgttcatctctctcctcttcccctccagaagtgctcggtttaaacacccggcatacatgtttctctaagcaacgtgaaacattgtgtcacagttttagagttttgacaaatgttaccatccatgtttctgttgcaacattacttcctcagcgttatgcttctgggattgaagcatcttaataaagtggggctgatctattctgtggaaataccacaacttatttatcctccctcttcaccatcatcccaatattttgtgtttgtgcacactgttgggaatgtgtgtccatcacctccccttgtgcgcatgtgcaagctttcaaaggtagtgatgaggttgctccaacatagagatgtctgccttctccttttctagaagctgccaaattgctttttgtggtttaaggtaatacagaaatacttgcattttccccgaggaagtcttgcaaaaattaggccagttattatttttgagtgctggagggccagaactgctccaaggatgaacacgcattccagtctgcatcttttctgctttgggaaacagataaaaatactgaggatcttgcccaggcttaatagcaaggggcagaaacctagtcaactgtcctcaaacccatctcttagcagcagtccaagctccaggtggtagcaagagaccagctatactatatttaaaatgacatgaagatagcagccaaagactctaagggggcaggggggtggggtggggaaaggcaggatgagccttgggcaggtactgctgttccagggtgtggaagaacaagcagatggtgactgaatttattcagcatccactaatgagtctgaccaaaagtccgttccaggctccatatgctccgaattcagttccatcctttcctgcctgcttcactgtagaggttcgttgctcatatcttcatgcactttaaagttccttttaacctaggacaggcgacttgccacagaaaggtcaaataaattttttagaagcaataacggatgcaacttgtacatgtgaattttaattgcaacactctaatccccattccaagtgccaaactttcaggattaatttgttgcatgtgttggtaacagggcactcagtcttcggagcggattcattgcccgagggccctcatttgctaatgagtaattgttgcaattttcagagaaaatgctactggtacaatcatgtttgagcattcatcaaatatgacgtgagcccagttaggagaaacgttagcgtccttagcctgcaaataaaagccaagcattcatttccagcatggtaatttccctaggctggtcacctccattatcattcggaacaaccggtgaactgtaggtagtacctgcgggtaggagcaggttttagcactgttaagtctgtagtcttgttccattgtatcttgtcactcaggcccattttggaagtaggcaggggtggaagaggaagccacttcggtaggaatgcatctctgtgtgcacacatcacagacagcaatgacatgctaattacagctttagacggagcatttcctctttctgcattttgtttgcaaacacccaattatttccatcctgcggtctggagaagaggaaaaaaaaaaggaaagcaaatccaagggagttgatcagtagtttctgcaaggctcgctgcctacctatctcctctgttgtggcttttcttcccgacaggttggaatttgaactctgcttgcttcccaatttagttattcttttagatccatttattattactattgttatgatgatgatgatgatgataatgagtgtgtgtgtgtgtgtgtgtgtgtgtgtgtgtgtgtgtgtgtttacctgcatgtatataagcataccctgtgcatgcagtgcccacagaggccagatgagggcaccaaatcttctggaactttctttacagttatgaactgccctgtgggtgctgggacccaatcctgtgctctctgcaagagcatctagtgcttttaactcctgagtcgtgtctctgccccctagttatctttttactcctacttgtctgtggaccagtggttgagattctacatctatatcaaggagttcagccttgtctattgtaggacatagaaatagcaccttgtgcctgtccagactgcacggaactgatgtcccatgcacttgtggcatgttcctgcacaaggcactgctgcttcctctgggaccacataggctatgcaacattgtggaacctggacatatagaatcttgggatggaccagtcaatgaatgggagcattgtggttacctgagctggaagaagagctgagttcgtaagtcaaaacaaaactatgttctagagcagcagaaataaaaaaatatgtttgaagagtggaataaaaatctcatactggcgaggataagcctgttcttttggtgaaaccacatttgcctgtttttgcttttgtttcctgtgattggagggtcttgtaaattagttggactgatagcccagacaaacctgcagtgccagcaacttggaaggactgaggaatgatttctgtgagttcaaggtcaacctggtttacagaatgagtttgaggccagccagggctacagagcaagatctgaaaaataaaacaacaatggctcccccaacaaaagacccaaaaagaaaagacgaaagctaataatagacaaactaataaaacaagatatttaaaatagtgcctacactggagtctttgagagtttcccatgtgtttctttcatgagtttctgagtttgaggggtttttttgttcattttttttttattctattttccctggttctggggttgaacctagagactcatacatgggctcagcccctgagctcggtcacagctcatcagctcttagatttaggttttcgggtgggttgtttttgcacagtgaacttgatttgctcgctgtgctccacacagaaaggcccagcttccccagcactgttttcggaacaggctgtcccctctcccgtgtgtgtcttggcacctctgttaggaatcagttggctgtagatgctgggtacctgtcagcggatgaatagagaaagaaagcgtggctctctatgcacaatgcagtgccatccaaccataaagaataatacaatcctgtcggttttggcaaggcaggtggagctggggaacactgtgttaagtaaaacgggacaaacaaaacgacaggcacccctgcatcccatctcatacccagagcagctagtgttggcctgagcatcaagcagtgggtagagtggtcaaaaggagctttgatttcttcagccatgtggtatttatgaaatgaaataaccacactagactcccatcatgtgtgcacttaacacattttaatcaaaaaggacataagatcaaaaacaaatggcaggatgggagatgggagaatggtggtacagtctggtgatccagtgcaaggctgctcctgtttctatgcaggcacaaaaggacacaccaagctcgggcatgtggagtataaagtccatgactaaggtctcttcctctttccctgatatctccccctcagcccccccgcccccaaccaccatcacttgtagtccatggaagaataaggaaacccagaaaggcactagattatctcaagaacaacctagccccacttttggaaatagaatctgattatagcacatccatttccttgtgcagttgactgtgcctgatctgggaaacagtgctaaagatcatgtgattgattctgttattttaggtatttatttatttgtgtgtgtgtgtgtgtgtgtgtgtgtgtgtgtgtgtgtgtgaactctgtgtttgtttatgtgtccatggatgtgcatttatatacgtgtatgcatgtgatgtttgtgtgtgtatacacgtgtgtggcctgtactgtaattctaaacagtgttggattacttaggagtgacacagcaaacgttctaaatagacttcttggttctaccttctcacaggttttctgaaccttatagccagtcagagcagcttctcattggtcactaagcatacaggggccaagtggtaatctgctgggacaaaccaaggaacaaggaagtgaatacagaatgtttgatcccgttacacaactgctttgcaaggttaagtttaggtctctgtgggagatatcttgagtagactcggattatacacagctatcatcattgcacagcaacctcgatcttcatgaggtcagccatacctgctgacagaagaccactaggatcaggcttagtaactattgatgttcctgcacggaaagaagaggtagagatgttattggactcccacctatcctggccagtcctatttattccttctctgagcacatgtgatctgaccatatgggtctagggaaggactagatatataggctcagggaagttaactgaagggaactccatctgcatggacagtggagaagctgtcatgcaggctggtgaagacctccctgtgtggctgctttgcggtcacccaggcttctctaggcaccgctcacatgctcagtaaataagcttcactggttttctcagggtgagcagcagttagacagctttagtttgtcattaggaccatatgaggcagggcggggcattgttttatgtctccctaggggagaaatcccttgacaaaacagtaaagggttttctaacactctaaacgtcttattcctgagctcatcgtggagaatgggaagggtattgtaattatgatgctatgggatggctgtcaatgtgtagatatcagatggctgtaaaacatacagatatataggatggctgtaaaacatatagaaagaatgccttgcaaaacttagtttgtcgcgtgttcttttctaaaggatgtaaacatttccttttcttgtgtgcgtatgagtgttttgcttacatcaatcaccatacaacacgtgtatgcagtgcctgcaggagccagatgggggcatcagattccctggtacaggagttccagatggttctgagttgccatgtgaatgctgagaactgaactcagctggggcctctgaaagaacaagacgtgctcttaactgccgagctgactctccagtcctgtctacagccttctaacaccaagtttgtagttacttcctaaaataccgagattggcatattttgtacaactgaatatttcaaacagccaatccaaactagagctaggccactaactctgaagggggaggaagtgaccggcttggccatgatctcctttactcacttcttcacaggggaaacacagtattcatggcaaacatcagccctagttgggtagctttggggtgtcagtaccctcgataactaccgaagacaccatcttgttttgcgcttataataaatagccacacgagaaagcagagacacagagttgtcaagccatggcctagaccttttagttttccagagacctggtgctctgcatgttagttgcccaatccactagacttggggctttgaactcaaggtgttttgatgtaagttaccttctacggagatgtcaacgggcaatgaatggattaatgagtgggtgatgcttataagaagtcccaggaagattcagagagactttgccagcccagtgatttatgctcagactggagacaaagtgtagtataagacacgtaagtccagcagaatgggcagatggaagccatgggaaatgaaatgggtcacatgactgctaagatgccttctgtcttctacctatgcctagtaggaccctgtaagaagacagcctaccccttccaatgccctggaaggcagagtagccactgtgtttgtatgccagcctgagaaaataagaccgataccagctgccactgactggggctcaacccattgcacatcctgtgtcaggtcctcacatcggcccttgtagatatcacctctattttgtacaggaggaaactgagtgccacttgaccctacctgcccttggggattgaaggtgaggtggtgcagagtcaatgactcagacttcaggagcaggtgagaaacgctgcagcgagctcatctgaacactgctgcaagctcctttaataccctccacccacaccccattagccccaagaaagcatctcttataaacagcagcttctgattggctggcactgtctgcatcagcaatccttggtctcccagatgttcctcaattaggtcctcctgcaggagatgcttttgtggctgcgtggcccatcgtttacatagtggtggccccactgccgccaccactcctgctacaactgaggaaagtcaggtgacttgcagtgtctcagggctcagaagtagaagtgaggtcagaatttatgcagtggcaaagcagttatcaagcttgaggtccccacagcatcaggtatctccagggatcaacattatggtgggttttcttcagttttccttgcctggaaaggctaagtaggaaccagaatgccctggagcatgatagaagtgaatctagacacatgaagggcctcatagactcctggggaccatgaaggcagtggttaaagaggcttcttgaggcaactctggcacaatctctgtgtgtgcagcatatgttcatgctcttggtgtgtgcagcatatgttcatgctcttggtgtgtgcagcatatgtccatgctcttggtacagctattgctagcctaactccagagccacttcatcttgtacagattgtgagtcaaggtgtgagaggaagtggcaggttgtgagattgatctgtggcctgtcagtgagtttgactcaattccaggaaactagcagtggacgaacgtgagattccattgtgtattaacgccccagagacaaacccatgcctcctattctctagttgggaatattgtgttgccagcttcaaggtctaagattttctttgaatgatttttttttcatgattcattgtgagatacattttattattgctgtgctgcagagattgaaaaaataaagtatattctcctctctctttgtaaaatgtagactttacttatatctaatcatgccatccctacccttcctagcctttccccaatcctccctgttccttcatgtgtcagtcagctttctgttgctgtaacaaaaatccctgatataaaaaaggaggaggaaaggcaaccttcttgctcccatgctgttaactgctgtattctgctatgtcgtcacagcttgctagatggcacttttaagatggtgagccaaaataaaccactcttccccctgatttctttgtgccagagaaagctaacacattggcccttaatctcaatattcttttttacataccttttatctgaatgtctgagttttacttttatctgtcttagttggtatcttattgctgtgaagagacaccatgaccaagacaactcattataaaagaaagcagttaagtggaagcttgctttcaagtttagaagttagtccattatcatcatgatgggaacatggcagcaaacagggagacatggtgctggagaactagctgagagttctacatcctgatatataggcagagagaggaggagcaggagactggagctggggtgggtttgctaaccctcaaagcctaccccagttacactcttctttcagcaaggccacacctactccaatacagcatcaattcctaatccttctcaaacaagccactgtctaatgactaagcattcaaatatatggtcatatggggttcattgcttttcaaaccatcacagtctacacagacaagaactcgatggaagagggatcttgttgactctctggttttctgctctacacctatacttagacctcgacatgtacacaggatagagtccttgggcacctcttccccaaccctgtgtgtttatgctgtattctcttttcaagtaaatcctaagcctcggctctttaaaagccgctgtatcatcactgagtcagtgttaacattgcaatatcttttgcacagaggattgcagaaaataaacttaattgacacaggctagtgctggaggattcccagaataaggaactggggttgatggcaagttcccaagccacagcctagaccttccaactacccagggatctagtgccctgcatgtcacctgcacagagatgcttcctggatgctgccacacccataagtaggcacagcaaaagttttgaaggccacctgtaaatgcctaggtgtaggtgcatatcttctctctcctggcctctcttccctcccccagactactcaagctgaacactagtagccctatacacccctataccgatctagctgccattgcctggagaatctatttggtcccaaacccagcacagaggttgagggtagatggcagagactggaaacaactagggacatggctgagatcttggatcactgagcaggcagaggagggagagggtggagaggtaggatgctaacaccctctagcgtagagtatgagagaggtagaactctggtcccccgacagatgagctcccctggaaaggagacatgcagcttggaacagaatactcctgacagggtctgacaagacccagagaatgcagaggttgcagggcatcttggacagccagctgctctggcaggaaaaacacagagtgcaaccttcctatcacagtctaagcatagccggattgttcctggtggagggtgcttaccaccaaggcttgctcctctgcagtcacccttcctccctgtggagctgtcctcagggactcttggatctggagtatgcttgcccagagcatcagaagtgcacctcccgctcacaccacaccttactatcctaaatacgtacctcaagccaaagttgctaacgagcttggagaaacgggtaaaaaggaagacagtggtggcaatgaaagagctgagccagcaaatccaagaaactaaatgccggcaggaaaggctgctgaaggacagcaggcagctagtccaggaaaaatactgtgtgcaggctgaaaaccagcttttcatggaatacctgtgtaaaaataagggacagtgtgagaagaaacaggaggagctgtagaagcagtacatccaagaatgtggcgagatagaactcgagagacaagaattggcatccagacacaaccagagaaacgcagctcttcaagcccagctcctgcagggcagaaagacccagaaggatttgaagcagcagttgcaggcactgaagccagtttacaagataaagaagggccaggacgtgaaaatacagaccttggagaaggagcaagagaaagtccgaggtgagactgcgatcaaggaccaggaggcgcacttccagttcctgcgggaaaaggcactgatggagaaggagctggaaatcaacaccacggggcttgagcttctgaaacctcaaaatccactcccaaagacatacttcctctaactggactgcacctactccaacaaggccacacttcctaatagcaccactccctatggcatagactgtggtctttgggtgtaggtataactttttctcaacctactttactaagggttcaacctcctctctagcccaccacccacaagaggtagtggaaaggaaaagttattaggacacggggggaatggatctgcttataaatagttctttgggggagggtccaatcttcattgtcagggtatcagccgttcagtcctcaggcaaacaccaacatgaaccagcagctgcaaaccagtccactcagcagacaccacacaggaaccagcaagggcagttcaactcagaagaaactgcgaggctcaccaaccggcccgagtccaccgcagaagtggcaagaaagccgcaggaacctcaggagactttctttggtgagtttctctttatgatgtcaccacaagcaaagcccaacaaggcaatgtaaggtgaaccaatatgtgcctgccatcagcaaagaatagcgaggtgaagcaaagtgaaccccaatgctggagcgcccactgtctctgggggtcatatttatattccttttaaacatcatgagtcttctcacatgtctgctatagcaaaacatccttttacctgtgcctgcttcagcaaaacatcctttcacctgtgtgccccagcaaaacatcatttgacaaaactgattttcctaagggaatcatttttatgcaaaccaccactggaaccaacttcaaacctagtccaaaccaatgaaaagggagctggaaactgaggcacagagcaaaaggacagggattaaactaatctgtgccatgcacccactgctataggctcccagaccccaggcctgctgactcactgctgctggctgcttgctgattgcatacattactgcattcttcccctgagtgctccctactggtgaccatgcaggaatatcatcatgaccctaactggtgcctctgaggtgggtacgtgggtaagagatgaatgaactgcaggcaaacagctcttaccttgtagctaaagctagcagtcagagagcactgattcccaagcaagagcctggtgctcagggttcccttaaagccatacagagcgtgtcaatgaaaggatgggtaaaaccacagagaaaatgctgtctgccttccctgatcactcaccctgagaattttgtgttgtttgcttttgatatttaatccccttcttattcatacaggttctttaaacattgaaatgtttgtaactctttagagctacttacccctggaaaagtgtgtgtgtgtgtgtgtgtgtgtgtgtgtgtgtgtgtgtgtgtgtcttggcagaagtggatggcacactctatcaaatgaattatttttgaaaggaattcttactgagctggggcaggggtaggaaagccacaggatggtccttgagcctggcagcatagtctcttgctacccccaaagcagggtagctatgacgtaacctgcaggaaggacaccatgaagggctggggctgatggttatatcagacagttattgtctctttacagagtgaaagtcctgtgtctttccaagctcctctgtagctaatcagagcaggaaatgaaaaggaaatctgaaatgttagctagctcttcgttactgtagcaaatacccaaggcaatcaatcagtttacaaagaggaagggctcatttttttgttcctagttagagatgccttgagtgcctgattcgttgggcctcactgttttagggcctatgatgagataacatgtcagaggcaagggataggaagaagggactgagtctgagatcccctccaaaggcgcagtgacttagatctcccactaggccccatcgatccaatggtccaccacacactggagaccaagcctttggcaaaggaccattggggagcggggacacttaaaatccaaatcatagcatctgctgaggcagcttcattcgtctgcctcctgatgtagattgatgtagagagaatgaggagtggatttagcagaatcaatgacaccccccagtcctcacaagaacagtgtggaatgggcccactagaaaaatatccaaacatgcaaaatgagacctatgttttggggccgcttgtctatcccttcatccaatctctggacttcatcttaagagctgatttatactgatgggatatttctttttctggattgaaaacaaactcttgagcctgtgggctcctttaagcctggaacaaccgagtgaatggatggctgcatacagcccgtctgggtcagctgcatggccagccactgtggtatttcttttcctattctaacataacaaagggctgactaagctaggaggggaacagagccagggaaggagactacagccctacagtattttatgggaatagtataaattgtggtcatctaaaggaagatttatgcctagaatttacaaggtaaacagaatcacccacaggaaggaaaaggacagattttcaaaccccagaccttctcttccgttttcttagctgaaggagaggtgagctggtgggcagacattgtgaggatcttgctgtaaactttacattgccctccccacccccaaaacacgttgaaagctccccatccctctttaagataactgacagttactctgagagaaaggaactcacaagctttagtataagggggctaaaatcacccagggttttgggttcaagcatgtgccatcctgcccaaggtgatgacagtggccgtttcttctcaggagctgtaggaaggaagctaggaagcctctagctctgaacagtattcagcaagaccattaacatttctgagcatcccatgattaaaataagaccatgttagatacttgcacagctgtgtggtgacataaaaggggatcagggaagaaggaaggaggagggaggggaggaggaggagaaggaggaggaagagaagggagaggagaaggaggaagaagaggaggatggaggggaggaggaagaggaggctgttggcttatcctgggtctacactttcatttgagcctgtagcaggatggtgctttgtggagtcttttgctagcttctgatgtctgctagactccccttgttcaaattctggatttaactgttcttgaagtttgaggtgaaatccggactttgagaaaaggatagtctttttaaaaatttttttattaggtattttcctcattttcatttccaatgctatcccaaaagtcccccataccctccccccctactcccctacccaccccctcccacttcttgaccctgacgttcccctgtactgaggcatataaagtttgcacgaccaatgggcctctctttccactgattgccagctaggccatcttctgatacatatgcagctagagacacaagctccaggggatactggttagtttatattgttgttccacctatagggttgcagatccctttagctccttggatactttctctagctcccccattgggggccttgtgacccatccaatagctgactgtgagcatccgcttctgtgtttgctaggccccagcatagtctctcaagagacagctatatcaaggtcctttcagcaaaatcttgctagtgtatgcaatggtgtctgcgtttggcggctggctgattatgggatggatccctggatatggtagtctctagatggtccatccttttgtctcagctccaaactttgtctctgcaactccttccatgggtgttttgttcccaattctaagaaggggcacttgatctttgacaagggagctaaaaccatccagtggaaaaaagacagcattttcaacaaatggtgctggcacaactggcagttaacatgtagaagaatgtgaattgatccattcctatctccttgtactagttaacatgtagaagaatgtgaattgatccattcctatctccttgtactaaggtcaaatctaagtggatcaaggaactccacataaaaccagagacactgaaacttatagaggagaaagtggggaaaagcctggaagatatgggcttccagggaaaaattcctgaatcgaacagcaatggcttgtgctgtaagatcaagaattgacaaatgggacctcataaaattgcaaagcttctgtaaggcaaaggacaccgtcaataagacaaaaaggtcaccaacagactgggaaaggatctttacctatcctaaatcagataggggactaatatctaatatatgtaaagaactgaagaaggtggactccagaaaatcagataaccccattaaaaaatggggctcagagctaaacaaagaattctcacctgaggaatactgaatggctgagaagcacctgaaaaaatgttcagcatccttaatcatcagggaaatgcaaatcaaaacagccctgagattccatctcacaccagtcaaaatggctaagatcaaaaattcaggtgacagcagaagctggcgagcatgtggaaaaagaggaacactcctccattgctggtgggattgcaagcttgtacgaccactctggaaatcagtctggcagttccgtagaaaattggacatagtactaccagaggatcccgcaatacctctcctgggcatatatccagaagatgttccaactggtaagaaagacacatgctccactatgttcatagcagccttatttataatagccagaagctggaaagaacccagatgcccctcaacagaggaatggatacagaaaatgtggtacatttacacaatggagtactactcagctataaaaaagaatgaatttatgaaattcctaggcaaatggattgacctggagggcatcatcctgagtgaggtaacccaatcacaaaagaactcacatgatatgtactcactgataagtggatattagcccagaaacttagaatacccaagatacaagatacaaagcacatgaaactcaagaagaacgaagaccaaagtgtggacattttgccccttcttagaattaggatagtcttttatgaagcacacctgtgctgggtccaggccccttgtttcccatttctccatctgctgcctcccagacaaaagccaccatgcttcatggaagccctgaccacctggcttcagcacctccctgtgtagtagacgggagctcacaggagctggagtctcgctcttcaggggaaatgtgatgggaccaaggactgccctgtgcgctggatgagaatccaaggaggttaaggaggagaaaacggaacaataagagaacccgctgacaagtctgtcagaagagggagctgggctcagaaacttactgtctggaatccttagatcttaaagaagggagggaactgagcctgttgtaactgaattgagtgacatttctctttattaaaaacttatgaagcctggcagaaaaggtgccaataaaagctgaggttctcccctcttagttatttacttttagcagtttgtatctagactttcaaataaaggttggtcggtttgtctgtctgtctatctatctatctatctatctatctatctatctatctatctatctatctatctattgtctatctatctatttatctatctatctatttttgggtaggcaaatgcttcttatttcttcaacaagggatactgcttgctgacatagttatttaaatataagtgtatatatagatacgtgcacatctttttagaggtatatagtgggcacacacactgtattgtacggacatgtgttgagtttggctcatcagtggggtagaagggggtgggtaaggagatgtctctctcactgggctagagagaagcagtggctacagtttgagtgaccatcctttgccctcctcagccctgaagttgcctagcatcaatgtctgatcctggtgtagccatgtttccctgactctcctgcactcctgtgctgtgacccacagggaatgttactcagagagcgccaggcagggatgatccgcctggacttgaagctgccttgcctttcatcttattaaaattaagccattaactacctttaatgtggaggttttgtggcttaattttctttggtggcatccattaaaaacaggggtgggtagcacaattgactggcagcatcttcagacatttagtatgtattattaatattcacatgtattattaatattccctacctgtactgagagctgtcatggttcagtctgagttatccccagagctataatgaaaccgtgtgtgtgtgtgtgtgtgtgtgtgtgtgtgtgtgtgtgtgtgtgttgtgtgtgtgtgtgtgtgttgtgtgtgtgtgtgttgtgtgtgtgtgtgtgtgtgtgtgtgttgtgtgtgtgtgtgttgtgtgtgtgtgtgtgtgttgtgtgtgtgtgtgtgtgtgttgtgtgtgtgtgtgtgtgtgtgtgtgtgtgtgtgtgtgtgttgtgtgtgtgtgtttttcctgattacctgaaatccagttggggctaaagaatagctcagaacatctggtagtgtcttaaagtgactttttatttcccagacctttaaagctgccacacagacttgtaaacgtgcacactgtatttatcctgctaacatggaattgtcctcatacgtgtttattttaatgaggtggaaacaccagagacatgtgatggcacacctcagacacagttgacttagacattaacggagactttgactgcgtgtctagggtatgcacaacactgagctaggctccaagagaggcatgcaatccggcccctgctttttaaaagttcaaagtcttacagagtagaagaaaatgtgcagtcaaaatggatgccaaatagtagcttctggatgtgagagatgagtgtcactggcagaaattctgtgagcatgcaaatcagctaggtggcctgataggttacagcatctctctctctctctctctctctctctctctctctctctctctctctctgtgtgtgtgtgtgtgtgtgtgtgttcattggggaaaatatttttagagaaaagatggggagatggagtaagacctaaggtttttcaagacccatttggataagctggagagatgagcgggtgtcccaggctacgcactgtgattatctgacttagagttgtgcagcccaggagactgtgatgagccagacccacatggcattgtcaaccatgtttagatctctgggtaggaggcatttctggagggtgttaagtttggaaggccttgtagagttgatgtttggggaaaggagaggtaaactctgctgctggcatgactaagcttggtgctgctgagcatctgggtcaggtgaacatggaaagaaagccccgtatttaagctgcaaagaattggctatagttcgtacctggaaaagccactgttagtgtggtctgaaagctgtcactgcagctcattttgactctttatctctggaaggacaagatgaccatcttgctacattttataatttcctgtcaatctgtatataatttgaaatcttctctatgaaattttcagattctaatttccttctgctttccaaacaaagctcatatctccatctttctctctctcccctcttaaatgtatatatataatgctagacttgctcctgcttagctggaggaacaagaggtgtcgctcagtggtcatgagcttgtttgggacgtaccaggtcctcagttacatctctgtctttgcaaaaggaaaaagaaaaatagaaagaaaggaaaagaaaagaagaaattaaggcagagccctgacattgttttctagatgtattgttaaattgaaaatgccttgtattgtttcccaaatgtatggtgacactgagaaattcttctattgttttctcaatgtattgttctgtattcaatcaggacagtatacaaaaatatgactaactcaagactattccacttctcactgttaatcttaaactcatgtgtctacatgtattgcatgttgtatgtctatgagtacacactgtgggaggggtaagcaagcatgtgtttacatacatgtgtgggggctagaagcaagctcagtgtcacttcttaggtgacatctggcttttatttttgagacagggcctgtcaccagcctggaacttgctaaattgccttgaccagtgggttagggagccccagggttctccttgtctttccttcttccatatagggattataggcacacacaccatgtctagcttttctattaacttttatttttatatttatttattttgattttatttcttattacctgtgtgtgtgtggggggggggtcaggcttgccacagggtggaagtctgaggacagcttttggaagtccattatcaccttccactttatgtgggttccagggatcagactcagatatccagatgcacacagcacgtgcctttttccactgagccattgccccagtccctgactgtcattttagattcttgattggcagtggactttgctaataaaagtcaaggaatagaagtcaagtcaatagggacagctgtgttgacaaatattattactgtgtttcaatgtatatcttgttaactcgattttattttcctgcactgaaatatgttctcccatggaagacagcctgtatttattagtgacttcctgtcttggcagcccccctgttgcctcatgggggggtggcttttctctcagcatatgtaatattcacattgattaattaatcgattagacaagtgtttattgagcgtgtgccttgtgtttggcataaatccaggtgctggagtgcagagggacatgaacagcagggccctgcactccgatctgcactataaaagtaggagacagacagtaaacacaccagagaccatgctacatacagaaatctgtaatggaaccaagcatgcaaaacatgtagggagagcactgtgggccatctctactcctataagatacatagaggtaaccagcaccctgcccatggagggctcatgtacatacattgaatgaaccaatggatggatgcatacgctatcctgccttcgctggcagactgttggctcatgctatcttatcacatcggtattgattatatatatgtagcattttcctttcacaagtggctgtcttaggtggtcttgtttctctggtgtcccttcatcctcctgcctcagataaatcagctgccagtcccttcaaggtgatggctttttcaggagcgcttcctaagccccttgtgtgggccttccatactctgcggatattattgtttaggtgtctatgtctttgtctaaatgaagcctcctccatggtcttcacacagaaatatatgcctctctgttgtggccaaacacatagaactgtttgctgtgaaacagaagtcaccatgcctggccatttgcctcatactttataaagaaaagaagttctatgtgttccacaattatagatgctaagatgttcaaatagcatagtgttggctcctggttgcatcatagtttaccacactgtcaccacaccgtgaggcatgctactaggtcatccaagtggcaataacaagtgtcagttataaactgtaatgcccacatgtgctatggcaggattttgaaatattaagtgtgtgggggcacccaagcgcactcacacacacacacacacacacacacacacacacacacacaccccacattgaataaatgaataaacaaaggaataaataaataaatggaaattttaaagatgaataattcatcaggctcataaagctggttcatttcagcattgcttttcaaatatctaggacctagaacttagagggttttcttcctccctctcttcctcccttcctgccttccatcttccatttttgtgtttctgagtttggaacctgggtccttgcaggtactgtgcagctgagccatagccacgcccagcatgtatgccttctgcgtgtcacctctcatctaagtccccctttttcccaaaagaaaaccaaatatagttgtctctgaatccacaggcttcatacccatggattcaatcaaccctggatcagaatcttcagaagaacttggtctcatgctggtggtgacagactgtcagccgtgcctgtcactactcctaagtggcaactatttacatagcacttacactggattaagggtcacaactaagctggaaatgatttacagtatgcaggataaacaggtcctttgcaaacactgtcattttataggaaggaactttagcatcactgttagtggtgtccagcatccacaggagtaactcagtctcatgtggacagcaagaggtcactgggctttgctttaaatactcatccagatggcacataggcacaattatgaagctgaagacacaggattcatgcattcgttcaataaatatttttcaagtattccctgtgccacataaggctacagcatctgaaataagcagactactttttgtaaggagcgtggatgtaatgtgggttggaatgggaagaggtggctatggaatgtgcacctcaaacacaacaaagttactggagggtgcatggtaggttgaaggtgataaatactatggaagaaaagacacaaagtgagcaaggccaaagactggggtgggggtgtggtgggggtgtctctgatctcagctagctacagaccttgtgaggaacactgactcaacaacaataacacaaacaaaagaaaaacaacagccaaaaaaaaaaaaaagagagagagagagaaataaggtggaattctcctaaggaaaacatcaggggtcaaattctatctgccacataaatatgcacacacacacacactgacacacacaaagtcatgtacacacacacaccagtatgtgcacacactcagatatattcatatatacacacagtagcatatgcaaccacaaacatgtatatgtacatgcacatgtacccacacacttgggcacgtgcacatacacacacacacactacacatacacaaatatcacatatcaccatatataccctttaagtttagacttcagtagcttttagtaaattctgttttgtataaacatcaccattaattccagaatacttatatcactcctaagagaagtagtctactttacaataagtcactccatcttttcctcctccgatccccctaccaatctcttatctgcatattccatgatggttctatggactggtctattctagtcatgtgatggaatcatgtatgggtttctgtacatgcattctttttcttaactgtatggtcccaaatccatccatattgtgacctatattgctaattcattttttatgtctttgtaatattccattgtgtgcacataccacacattgcttgtctatttatttgtattgaacattaggtggttatgctttctgccattaataatgcttctgtaatggcagggcacaggtttttgtgtgaatgtaccttttaatttatatagtatgtatcccggagtggaaggccttaccttcctcctcacatgaagtggaagccatagcaggtttcttacctgttctggccttcacactaggtgtttcctctggctgtgcagcgagtgaatgcagacagtgggtaggtaataatgagtggaaatcagaccagttaggagctgattgcagtggttcaggtgagaggagaggtctcagaccaggacaggagctgtatgtgcggagcatagtcacatttgggacatattgtaaaggcagccaggagagtttcttcttagtgaagtaaaagtgggcagggaggagctaaggactttggctccatctgctagaaggaaggggcagccatggagtggggtgagagagccacacatgggctcaggagttccacttgcatagaccaaggttaagatggtcagcagacatcctcagggagatgacaggcaggcagataaatgggtctggagttcaggaagttgtctgtgctgcagatataaatttgggaatctctggcatgctgatgatatttagaaccaatgaggtagagtagtcactgagttcccatttgttttaaagggacaaagcagcctgctcgttgatagagttttagccttttctatgtactgagttccaacgatgacctcatgttatgaaaacatacattagagagaaggttctctctagagaatgcgattccaacatggttaaactaccggcctcagggcataaattagaggatttattcatttatatattagggccatgaatcaatattggattcagtatctcatggtattttctaactgattttgagggatatatatatatatatatatatatatatatatatatatatatacacatacacacacacacacacacacacacacacacacacacacatatatatctgttgtctgcttccacaccagcttgtgatcagtatacaaaggagagggaatcacatttggttttggtattaataaaaaaagcagtgaactcacataccattagtagacatgggatttcctaataccagaagtggggtggtatttgaggccagagataaaaagaaaaagatctgttgtgtataaggaaataataataaaatcctgaatgagctgaagaaaaataaccatcaaagacaagagagggcatgctaggggagatggcacagttggtaaggggcatggggaccctcatctggtccccagcactcacctgtgaggagctggtgcagtggctcacatctggaatgctgctggtggaggaaggggaacacagagactggcaggtatctgctcggctagcccagctgaactggagaactccagcttcaatgagaggccctatctcaaaacacaggatgggagtggccacggaggacatcagacactggacgatgacctcagcttgtatgcacactccaacatgaacataggaagcatacaaagacagaaagagcctggattgtccagcaaccacatcagggaggaataactgaagatgtaagccggcacagcccaaggaagactggatacaagaggagtaggaatttgattcagctgtatgatactttatcagttgtgtccaacctgtgacctatgggcctcatgggacccacaagagctgtgcacatggctcaacacaaagtcataaacctagaacagcatgtggtagggtggctttatttatttacttatttttgcattttttaactcactgtacaatcattgagcatgagcccacatacaaccaagaacagaagcctgaatctacaatcccagcatacccatggagaggtgagggcagaaagaagcaggtcatggccagccaccctgctgcatacagtgacaagtgactagagagcctgttgaggaggtagaaggttaaaaccaatactcaagattatcctctgactgcacacatgtgttgtggaatgtgtgagtgcgtacacacacacacacacacacacacacacacattttaaaaggaagctagctaagatgacaggctgaaatgattcctacccttgtgaaaggagatgacattgttgaattattcctaagggggcatgaatacctctcaggactaaggcgggtttacctccagcagatacgtagtgcttatggttccagtcctcagaagagcataccagaagccatcatttctactcagctctgggaaacacataatagtttttcttaaaataagaccacaaaacacgatcaaagggcatctatccatggttatctttgaaacatttctcccttggagaaagtggctgtttagagccggcactcaaccacgtggttttctcccttatctttactgctgtatggatctctttgtgaccagtggctggcaggggcctctctgcccgcagcaccagcctgactggcacgagagtcatttcaggttctgttgccatgtttcagtcaatctgtctagagaacagtgacgctcctgaaacactcagatgctctcacatgtcatgcaaaaggacaaaggacaatcccaggttctgtgtttgaactatcccccagggaaagtaacatcactatttggggcccattgatgggagcccatctgtgaagtgggaaccatggcagattctccagagagattcctgtctctttccccacactgcagagacggatgtgctgaccattggttcctagtcccagacttttgatcttcacaagaaaccaataccattgaattgtgtcgttccctggatcatcagactgcctgtcagctccccacagagataagaaagagatcttgccacacacgaagacagatgtgaccaagtactaattattatcttcagaggtgaatgcaaatgtcaccattattgagcactgagatttattttttcctgaactcccaagagcctctgagctggaatctggccttcagaccttgacagatgtcctctgctagtctgagcaggttctggattgatgtgacatcacgtggccatcctccctcccccccccctctctctctttgagtgctacagcagcatctgaccaaatgctgctcactggggaaccatgtgtgttttttgccattcttgccaatgaagctcatagctgagggagggagagggagaggggagggggagggggagagggagacggggagggagagggggagggggagagggagacggggagggagagggggagggagagggagaggaacacacaaatgagcaagctatgtttgatcccacagtaggtacacagagtgagactgcttagcaggcaattcagtgtgtgtgtgtgtgtgtggggggggatactcagttttaggacagaactttagactaagagaaggcatagctgggtagagagggggtattggatggactctgcagagacctcgatttactacttgctctggaggcccagttcctgtgttctccacctgcctcctgtcttgctgggtcttctcactcaccagctgtgtgggcgtgtcatggttcacggttccaagggagctgtgagcacacatgtgacccctgttgttggtgaagccatatgggcatgggaatgtgagccgtcatcagttcaggcagggttgactatgtcccattcaagtgcaggaagtcacaggggcagaggctgggacccctgttctcataccccatgtttataattgcctggaaagtggagaaggacgtggtggtcaaaactgtagaccacctattctccctgcctccatacctaggtctcagggagtttgcgggtacttgtgtctgatgttcaatgtagactctgggaggctgatgacaagaagctgtgtcagatccgactttgataaaagtaataactagtaatgaacctgcatagagtattagactcaaggcaaaggataaagcagccacctctctgctctggtctcatgggacctaacagtgccgtccaggaccgacatggaagcggagcttagagtgttgtaggtgtttcactagagtgggaaacgttttccactgacttatgtctttgaatacttggtcaccagctagtgatgctgttttgggaggttgaagaacctttaggaggaggggtcaggctgcaagaaacagttcatcagggacaggtcttttaggttataacacaatttagctttcagcatgtcatctttgcttcctgactcctcaggatacgagtgagcagcttcacactcctgcctccatgcatccagctgcttgggttacttcaccttcccgaccacgacaagcacgtgccctctcaaaaccgggagacaaaataaggccttcccctgataagttgtttcctgtcaggtgtttggtcatagaaacaggaaaagcatccaatatagttgtttagtactacagtactataaataaataataatgaggtaaatcaatgtataaagatgagaaatttatttcagttcacagttttggtctgtggttggttggtctcatagcatttagacttgggctcaaagactcgtccagtgccacctagctggaactgcagttcaggtcttcttctcccaagaaccccagttccagaagcctcacttttgacctggattcctgtacctgtgagtaccacaagaagttactctaactgaggggatgtgtgtggtactttgaatgagacatggtcctatggatgtgggtagttggacattcagtttccagttggtgatgctccaggaggcatggccttgctggaggtgtgtcacttggggagggactttgagattccataaccgcatccttctttctccagttttttgtctctaagttgtgtttgtggttgtaggtgtggtcttcatgcctgctaactgcagccatggcaagggtgttgctcagcagtagatgtttgcttaccatgcacgaggctctggctttgatttcttttttctccaggtattattccttctctaactgcacaggaactttttttcctcctttatattttctttccctggttttatcttaataccccctgccttcccttcctttgcaagtgttaataagtcttggatgtgtttttactcattctgggactaaatctttttcaccaaagaaagagctaatgaaatgtcccaatacacatctgtgatattttagcaatgcagataagatctagaaactcaagggagctacacaaagcttttcatgtaaagttagtggaggcaaacggccacacgagtcacataaaacatcttaaccattgttagacagacctcagagccctgtaaggaggccctgagtaggtccttgggtatattctaaggtgaccagagatgctagccctctgtggagttcctgcaatggattcctccctggaatattagactcatagaatatagatgaagagaaaactttacagcaaaatgaatccaattttggagcattgttagagactaacatttgggatttgttccaaactgtacatttggaaatcattccagcagtttggagtcttttatatttttaatactgtgggccattagctgctcttcctcttcctcttcctcttcctcttcctcttcctcttcctcttcctcttcctcttcctcttcttcttcttcttcttcttcttcttcttcttcttcttcttcttcttcttcttcttcttcttcttcttctccttcttcttctccccctctccctcccctcccctccttcttctcctttttcttcctcctcttcctcctccatttcctcctctttcccctcctccccctcctcctcttcctatttagccacagaaaggagggaagttcttacacatgctctctcatggatgaacctgggagacatgatgatgaaggcaggtataagagaacaaacatagctgcttatatgaggtacccaggttaggcaagccatagatacagaaagcagcatggtgacctccagaggttggaggtagagagaatggggagttagtattttctgagtaacagagttggagcttggaatactgtgaaggtttggaactttacattggtaaatgttgaataatattgtgtctacatctaataccattgagtcttatacttaaaatagcccatggcaaagggcctggtgcatatgcactgatacatgtacattaatttttaggaggctacatgtaggtctggggagatgcctcagttggtaagtatcttacaatcatagttcccagagccaatgtaaacaaatgttcagtatggaggcatacttgcaatcccagcactggggaagcagagaaaggtggacccctggggctgggtggaagagacagatggatcctagcctgatttaaaatagaaaaaggtggacaccctctgagaatgtacagactctcccaccacatggatgctccacacacaggactctgaggagaacattgaggggttggagaccctgtgtggccatatcctgtcaccacagatcctcagaacaagacatcacagtgatgccctctgtcccttcacataagtgggactgacatttgctccacagcttcggtgaacaaatgaaggaagaatacagatgctgtccagcaatgatttgcatctcaattgataatcgggctggctggctgtaacattcttctgcacggtggcctctccctgtagccatcattcttaaatgtcctggcatttatgaaaccagactcctttaagacaagacctgacctttcccaacggagcttcaagcaatctataggtactggttaaaaatagaaaatggtgtgctttttcaggggctaacataggcaaagcagagagagggtgggtgcagtcaagtctgtctgtttgagggcttcttctgcaatgcctttccacttgttcctcccaaccattcaggttcaaaccacatcactaaacattttatgaattcagtgaaaacctccacaaaaaggctcttgcctttttaaaatgagggtcatatttggaggaaagaaaaacatctatcaatttaaaaaaatttctaggaaataacttctggaaaaggattagattgagcaggcaagtccaaatgaaaggaggtaggggagaatgtcatatgtgataacataggaattattttcatttagaacttttatacatataataatagtatacacaccatctcattaaatgctcccaacaacccagcaaagcagctacccttctgtcaaactaaaaaaaatgaaggttggcttcttcaaggtctataggaagaagcccaatggcccagcatccaaggtcctgggcctgggtttattacttgtagctacttctggataattaacctccatgactctatctgcctgtggcatggctctctaactgtgaataaatgatagcaaggacattctgagcccctatgaatgtgctgcttttttgtggagatcatcatgccacgttttcctaaaatgatgtggggggttaaattgacagatatcaaaagatttaatgactcaaaactacctaaaaaggaccacctacaccgttttcatagtttatcccaggaataaatgagaggcaaggtctttgcttgaaagtgactcggagtcaacatagcaacagggaagtgttcagggagtatggggtctgtgcagcaactgccactagcaaagaagcaagctaatcctgcaggttcaggcttccatggtttgctttggttggctggctttggcccgacctactcccttttggtagcctggctctgtgcttattaattgatctcatagagatgatgtatcaaaagaagaatagtttctggtcctaaggtttaaactctcttcttcaacctatttttattttttgtgacttcatgtatactaggcaggttctgtaccactgagcgaattaacctgggtggataaatcagtggtaggtagataaaaagatggatagatggatggatggatggatggatggatggatagatagatagatacatagatagatagatagatagatatattaatagataatagataggtgacagttgcttgatagatagaagaaagatagatggatagacagatgatagatggacagatagataaatagatggctatatgatatatagaagaaagatggatagatgataggtagatagatagatagatagatagatagatagatagatagatagacagacaataggtagaagaaagattgatggataaatagatagatagacagacaggcagacagtcaaatatgtgacaaatgccagataatagatgatgtaaatagacacataaaaagacaacagataattggtagatagattatagttacatggggatagttcagtagcatgtagtgctgcatgctaatgtggtgctctaccactgtcttagtttcttttctattgctgtgaccatgcaaccaagggaacttatagaagggagagtttaattgggcttacagtttcagagagttggagtccatgatggcagagtaaaggcaacacagcaggaacagatgagagcgcacatcttaatatgaaaatagaaggtgtgggtgggggtgaagaggagagagagagagagagagaacaaagtgctattgcatttgcatttcagacactaaactcagagggagggctggaagaggttaatgttgtgagtgagtggttaatgaccatgggtaagactggctgatgcatagtacactgatagtgctcctttgtcaggctattctcaaatgaccttgaccctcctctcagggggctcactggactccagcaccccaaatccttgaaatggattctgtccatttgtatggatagaaaagcaaactctcaccttctaaaagtcactcacgtgagacatgggacagacggtccacattatggcagctatgtagatctgtgtactgagggtctaggcctagaccacttgctgttactgtaatctgtctattttgttagcttctgttactataacagtttataaagagaagaatgttggttttggctcacagttttagaagtttctatttgtgagttcttagttgtatttcctttgggcttgtgacaaagagtacaaagtcattcacttcacaaccaggaaccaaaaaagtggatgaagagatcagaatctcacagcccccttctagggtaccttcactgtgacttgaagatttcccactacaccttgactcccagtggctccatgtactatatgtcccaggagtactaagctggagatcaggcctttaacacgtgggcaaaccctagcatcatgtcttgaactaacttaatacagcatagtcccaagaagccatgtgaatctatgcatccttttctctctgtgtgtgtgtgtgtgtgtgtgcacatgtgtgtgtgtgcatgcatgcacgcaggtgtgatcatgtctggagatcagagaacaacttttaatgttggtccccaccttctatattgcttgagacaaggtctctatttttccactgcatacatcaggctggctagccatgaacctctgagaagcctcctgtctctgccttatatcatcccacagtcattgctgggattaccaacatttataatacatctctggttcttatgtaggttctgaggatttgaacttacatcttcatacttgcacagcaagcaccttttcccagagagccatctatctacctctcctgcatccgttttaaacccgagttgtagcaacattgttgaaattgcaggtacatgcaacataaataaacatgggctggactcatgaagcaagtaaaggagagtccttggatctcatggacttgacaccatattatccattcaaacttgtaagattcgtgatcaaactctggggtaaaaacctaagagtgccaaactatgtaccaggctacagtgatcttgagatgtcctgcaagtgtgagctcagccttttcttcttgaaagaaggtcagatttggtgtagttcagacatagcactgcctgtcccagagactttagttgtacatatgtgaagtctaaggagatcagcagcaaaaggctgggcagaagggtcaggatataagagtgtggcttagttcaactgtaccggaagtctgagatgatacacatattcttctactactactcataatagctaaggattactgagtgtgcggaacacgcccagcaccttttcctaaaaacttcatccgaattatctcgtgtaaatttttttccagccacattttaaggttaatctgcacttttagagccaagtaccatgctcagagcagctcactaataaatgcctaagctgtgcgcgagactttctctctctctctgtttgtactctaccatactgctctgtgcctgtttgcttcatggtcgggaatgataaatcagtctcacttccttgcctcctacaatcagctcttggcctgtaatctgagagatggagttggtaggaaatcatgatgtgaattagttacggtacatgcagtaggcagagccagtatgaaggaatgaaaacaggacttagcagtcccatatcagcttatcctcattctgtccacagggactcctcggctacagaggtttccataggacctatttttattactaggccatatttgtatttctagcctgtcagtgggctactagttaataaaaagcagactgtttcatattagagtcttatcaaaagcagcacctgtcatccatcagtcccactttcagaggttttctttgtcaatattgagtccttagaagatgacatatgtgatgagaaagatttgagaatacacgagaagtattgtctgctgcgtttatcgtggtaagtaaacctttgtgttaagactctgaacgctggggctgtggaggttgctctgttgcaaagagcttggtatgcacaacggcggaagttcaatcctcagaacccacttagaacaatccaggtgtgacagtgtgtgtgttccagcaccggggacatatagacaggtgaatcccttggactctatggccagccagcctaacctaacaggggagatgtagactactgagagaccttgtctccaaaagcatggtggacagtcactgaggaatgacacctgagattgttctctggcctccacatctgtgtgcacatatacctgcacatctgtgcatacatataagcccccccccacatgtgcacacccagtaaatttacacatgtaaaccctgagtgttgagtggctacccaatattgtaggattttgtttgttgtttgtttgcttcttgatttttgaatctgccagaacagaagaagtaagcattgtttggaactgtctacaatgttttcaagaaagtcagagcctccacattctttgtgttttatagaaatctgaacacatttctaactctgctggacttaaggttttgttttattttatttattgcttagattggactttgtcccatgagaaaccactgggcagatttaattttgtgcagtctctcttttgagacagagtatttattgtctggcaagattatccaaaagaaggaaatgagtttcaaccagagatgggggaacccaaaacgttgaggtcagagctaacatataggtgcctttgtcttgctgacatcaatatttttgtatttctcatctagaaaggaaacagctaagtattgatattttagaatgaaaacctctccgttttattgactgctgttatattctgttgttctgatataaaaatgttgtttgctggggacatactgctcatctgtgtccaataccacatttgtcattaccacagtctaacttggtctagggcacaagagcaagcctgagggagggttacagatggaggagccgctggcttctaagcatgaggactcccaatgcaggagagaagctggggagcccaagctggctggtggattaaatggtaggctgcattctagccttacctcccgatgtctttggctagtactcacaacatttctcatgatctcagtttccttcactggacacatggacttgaaaaaagatctctaggttccagccaagtctggagtttggagtttgtgtgagactacatcaggccctttctgaggtatctctcctccatgtgtggcaagggagcagcagtgtgatcttactctgtgctccttaggtccctcccctctgtgctccttaggtccctcccctctgtgctccttaggtccctcccctctgtgctccttaggtccctcccctctgtgctccttaggtccctccccggagctcttcctctgagtcccccaatccaagctctttgcttaaatttcgtttaatccctttgtagtggttagagatgccactctggcagcctttctgctttctctgttttgttttagaagagtttacattctatactctttttttgttttaagatgatatttacaagctttgcaagctgcctatggatggggtgggggtggagaggggggagagagggagagagaaagagagaaagagagagagagatccagttatcttaaatagagtgtcagttgccaactttggtgggagggtagggggtggcggagagtgtcttcagtagccttagtttctatatgtgtacatttaagtgtatagaggaaagtgagttaagaattggccaagctataacactttatatgtctttaaaaggaaagcaaagatggaaaagtcactactgtggccaggacaggttcacaatgacttgggaagcaaagcagggttttccaagtgacttgtgcccatgtggttgcttgcagttactctggggaatatgactggcttctcatggtttgaggttggagaaactgtgggttttcctttttaaagccttgtatgtaagataaggaagaaaggaaggaagaaaggaaggaaggaaggaaggaaggaaggaaggaaggaaggaaggaaaaaaggattgcaccacattaaccacattaaagtatatgcaagcatgtgtgttaaccatctgatagaaagtgatgtaatccacttcataaaattggtgaagtagcacagccctgcccttctaggcatttccacagtagttttcattaaaagtcacactccagggccttagcagataaagacagttgctgacaaagaacctgagattgattcctagactcgatatgatagtcttgggttggcttgagtcagtcagtctcatggaggctgcttgtatctttgtaattttattttcaattaaattagcaagtataccagctagaattcccaaaacaggcactggaaaaagacctaagttacccaattgaatgacataaacttttgagtgtctatgattggtgtgttcaagataatagatggtagagtgaggaatttcatcagaaacctgacatctggttttttgtttgtttggtttttgtttgatttttaaagacaaacaagcaaattggtaattttgtaacctaaaaaaaaaagaaagaaagaaacattggttagtgggaaatcactagacaaaccccatcacatattaaatttagtataagatgaaactggtgaaatggaagatagaccagtagattatattcatgtaaatgcattgagcaaaaaggatggggaatttgacgagaagcataaaagacacatgggtcatacttttctccacattcaaacatggagccaaagtctgggaaatagaaggtgagaccaatacagaagtgatattcccaaaagctggtcaaaaccatcagaagataaattcaggaagccttgcctatcatctccagagccatatgtagaagactgtagcaagcataactaagcctgacgaagacaaaagccaaaggggataatcaatacagcattgaggagacaacactcttttcatggaaacaacatgggactgatcacttgcttcccagcaaaagtggtagatgctgagacaataggatgtcatgggcatgttctgtggggtgtactgctgactgccagacacacagaagtatgaccgaagtatttgtcaacacttgaagtaaaattaggacaccttaaaccaacaatttcaggaatccactgctgtagagcaaccctaaatgaaataggaacaggaatgacacagaagggaaagatggtcccacacactcaggaagaatcaagtgacagatagggtgaaaatttgctgggctaggaaacattggaaataaaatgtgtgttgatggttgtttgtgaaggcatgaggaggtaggtgaaaaagcttgcaaaaaaaaagctccttatgtgagtctacatcacagctcctggatttgtggctcaggaaatgtactggctagttttgtgtcaacttgacacagctggagatatcacagagaaaggagcttcagttgatgaaatgcctccatgagatccaactgtaaggcattttctcaattagtgatcaagagggaaaggccccttgtgggtgggacttatctctaggctggcagtcttgggttctataagagagcaggctgagcaagccaggggaagcaagccagtaaagaacatccctccatggcctctgtatcagctcctgctccctaacctgcttgagttccagtcctgacttctttcagtgatgaacagcaatgtggaaatgtaagctgaataaaccctttcctccccaacttgcttcttggtcatgatgttttgtccaggagtagaaaccctgactaagacaggaaacatcccagaagatggggcagaaagattacaggaatcagaacacgagagagtctgcagtaaaaccgtctttcctccaaagggctgcataagcgagaccagaaggatgccaacgttgatgggcatattaacacagaaggggaatttttgcatagtcccacccccagacaaagagctacagggtgctgatggcttccaggagaagtgggattagctcttctcaggaggtgagcccccttattagttgtccaacgtggagtggtcagccctaaaactgtatttgggcaaacaacaaaaatggactcagcagtttgtatccatgcacttgtgcatacatatctatatccatgtgacagtaacaatcaatacaagaaactatcaacttaagagtaagaggatcagaagggcttgagagaggtggctctcaggggtagaagaatgagagttggggatggtaagatcctatctaaggttaaaacacaatttaagaaatttaaatgtaaaccatttatgggcactcactgttgaattcttctcacattgctgttggaaacttatagaataaaatattgagaaaatttactggcaagtagaaataagttttgattatgtaaaacaacaaaacaggattttttgtttatgtagcaataggtttaggaccaaagccatacaaaaagaagagagttaaataaaattaaaacattataagtcatagtaatatttgagtgtgtctaaagttggaattgtgctagactatagtaatttcagggcccataatgtaagctgtagagtaatgaataaaatattgtatgtagaaggtgaaataaaatggaaaatacttggttaatgtaaaaactgcaaagatgagaaaagagaaaaagatataagtagactagcagaaaacaattctaaaatggaaggtatggaaagcaactaaacactccaattaaaatacaattttctgcttatactttaaaataaaatctaattgtgtactcttcataaatggtgctgcttaaagtgtagaacccagagaagttgagaataaaaaacagaaaaaaaaaaaagatacatcccgtaagtatccaataaagtaagctgtatagctctattaatgaagaaaattactataaggcaagataagaaccatcatttaagattaatgaaggcattttaacaataaaagagtcagttaacaagaaatatgtgacaagtccacatttgtatataccctagaacatggctgaagccctatacactgtcttagttcattttgtgctagccatcaaagaacctaggatgggcagtttatacagaataaagatttatttcttacagttctggaaactggttaagtccaaggacagtggcccacatgtgctggctattcttagttttcaacttgactacatctggaattaactaaaacacaagtggctgggaacacctgtaaaggatttttcctaattaactcatttgaagtggggagacccaccctaaatccagatcttttgaggtgggaagatccactttaatctgggccacagcttctgctggcagcccatataaaggacatggaaaaatgaatgtgcatgcatgcgcgcgcgcgcacacacacacacacacacacacacacacacacacgcatgcatgcacacacacacattctgttcctctagagaaccctgaactattctacataaggactttcttgccataatatggcagaagacagaaaagcaagataatgcccttgaggcagacagacttatctctgaaaggcagatgtctcatggcctatgacctactctgcttttgcaggccctgcctctctgttgttactttggaaagtatgtttctaacatgtgaacttcaaaagacacattcaaaccatagaaactattattgtttaatttttactaggctaatctttagactacagctccttaaacagggttcaactccatatgggactccacaagaaaatgtggggggttgcaaaaaatttggcaaaaataaaagatgtctgaatgggcaatgacataaaaactgattcaaaaccaaatttataatgaatcaaggctttctcatagctcctgaccatatttcattgtacaagttccccacagccttggtcttaacacagtgtatacattttgttctgggcaggccatctggcttgcaatgccagagctcacttcctggaaagctgggtttgatacatgcagttgtaatcccagcagcgagggggatgaagcaagcagaattctgggcttcctggccaaacagcctaccctagtcagcaaagccccaaatcactccctcacagaaaaaaaaaaaaaaccgtagaggatacttgagggtacccaaggctgacctctggcttctacatgtatcatcatcatcatcaataaaaaaattctgtttgagttgctggcttgagtcctattaaaaaacaatcattaactgaattctggcctggaatttggactgaagctccaacaatttctaaaatgtcacttctgtcatctgtactaggcattgatgtgaggtggtgtcctcagcactgacaattataaaataaaaatatctatgaattcctggaagcattgagtatgctgtatatgctacaatatcaaataatagcccatatgaacgacgttggccatcctgttagtatgggaatttgcttttgtctttaataagtagcaaacttgcatcaaataattactttaaaataaaattttctatgacctattgctgaaaatctttgattgtagatgtatcttacatgcctatgtacctggggtcgcataatcatttctttggtgaaaaggagtcaagagtagggaagtttaagatccacgattttaagcacttgctaagttatggcatagtgtacttagttctttccaagtatatgttgggacattgactgacattgaccacatgttggctcattaaacaagtgtcaacaaatgccagagggctaactgcattctagagtatcctttctgaccacaaagaaatttgtacatcagtctctcctggtctaacaaaacatcccaatggatctctgagaatattttgaaggtaggtgatcctgacgcctgaacacattcagggctaactggccgatccccctggtgtgtactcttgatcaaggcacctgggatgttgcctactcctctgatgtgaattaatacctcgcctatggccatacgctatgcatgcctcaggaacatgtttttgaccgctgactgtgggacaagaatggaggtaattacaataatgtgttgattcaggtgtgattttcaattaccagataaaaagcaggacttgggtgaagcattttgaaaacagtcattttctcatattatccccatctccaaaaaaaaaaaaatgtgatggtgtatgtaatttacagagatttcaacattcccaaatcatcgttacttgtaaaccatatcttttcatttccaagtagatctctttcctttatggaggtcttcctgggcacagagggagggggtgacaaactgtctgatatactttatggtctaatgttttttattaaccctttggataacatacagactgagaggtccactgtgacatcttatccacgtgtttgttgccatgtgtattagtcagggttctctagagtcacagaacttatgggtagtctttatatagtaagggaatttgttgatgacttacagtctgtagtccaactccccaacaatggtcagcagcagctgtgaatggaagtacaaagatctagcagttgttcagtctcacaaagctagcaggtgaagaagagagagcaaatctttcttcttccaatgtccttatgtaggtatccagcagaaggtgtggtctagattacaggtgtgtgccaccactcctggatctgggacttgctttgaccttgaactcagagatctccctgtcttaaacttccgggattcatagccactatgcctcaagatttccatactaagatccaggtcagaaacttgtgtttccagtctccagattaggatcacaggtgagccttccaattctggattagagttcattccagatatagcaggttgacaaccagaaatagccactacatcatgcttaggtcttcttcaccctatcccctctcttacctttcctccccacttactagtatccaatctgggtactgtgttatatttatgaatatatatacatatatttgtgtgtgtgcctatatattcattcctcatagagaaagcatacagtagtttgcctttcttataccattatttttcctgttcgcccttcactcttcctagacacttccttcccctgtatgtataccatatatgtgtaatgtgaaaatagaagaggcacacacacagagacacacacatacacacacacacacacacacacacacacacacacacacacacacacatatatacatgcaatatatacactatatatattctgtacacaaaagaacacatgtagtgcttgctttccgatgttggcttatgttgcttggcatgacaactgtattctcacgtgttcaagcaagtttacttcagtgcagtcagagatcctgagaaaggagccagagacttctcagtaacctgagtaacgggatctgccccagttatcaaggtcattgctcctgtgcttaattagaagctagtgggatgttatcacttagtctactagcagagagcttccttgaaaggcacagagttagggaatgataggatgaaatagagttaatggaccatatcagagtctgcttacccacaacaaatctgaaaaaagcaagaaagcagagaaagacacagacactgccaaccttatcatatgagtgtgtgtgtgtttaaatctccatggactttcagtttttcttcctttgaataatatagtcattattcttttgctttctttcagcttagggcttccaaatattttaccagctgcctttctaagctgcctttgagaaaggctagtctcaacccaccaaccacctcacaatgaaaaatctgagatgctctgaggaagagagaaagactgcttttccctctctcccctccgttaccttccaatatttcttctcctgacttttgttcctccttttgcatcccatagtaaagggtgtggggtgctggtgaagagaagatgcaaagttgtgtttgtgtgggttggaagggaagtggttgttagcaggtgtcctttaagaaaatcagacttcctggcagtcacaagggaacaggttgcccaaagaactttgagtgcatcttgtctgggttgtaacttcaaatctcttttattttactgtcagtcaatggcttctgttactcttgctcaaagagaaaggtgtgtggaggcttcaagctggggggtgattctctgtgtcctcagcattgacccatattaaaaacccaagaacactaacataaagacactgtgtgttcacatgtgtgcacatggagtgggcacttcatggagagacactgtacaaacatcatcagggtttatccaacaccctctgagtatggagaagtttaaaccagcctagatatactgcatgacctgcagaaagcaacaggtaagctaaaatagggcctcttaagctttttcactaacgacagtctgcccaacacctttttgtacaaccccaaatgcataggtatataatacaggtaagcaaaccaaatgtttactgcataataatcattcatcaatacagttattttaaatattttgatatgcgcaataattttattatttatgaaggcaaaatttcataaataaaaatttctagtaaggtgaggacacttattcttgcataaaagtgtaaatctcgactgagtatttgatactgcaggacacaggaccaatgattttcggggttgattgatactttgactttataatcatcaatgctatgaataatgctgtacataaatacatagtacagagtggtagaaatgcatccgggaccatttcaaaagttgttctgtcctaattccatgtcaaaattcatctgggcgttttaaaacctcatattgcaacacaattaaatctgaagatttgcaccccaggtgctcacacgcaccctgaggagcagaggaaagcattcatgactttctgtaacttaaccgctatgttcccttaagagcagagcactcgcctgctaggaaggacactgacggaaattcctaatgtcatacctcagacctaagttgcttcaggctagccttactgtcatggatggcaagacagatgcgtggtgaagcatcttatgagcttagaaccaaggctgcagtatagtcacatgatataatgtgctaagcatgattagactccttgggttcattaccttataggcagaacaatagtctgactgtatactaactatgtactatatactgctgccaacttgttcacaacctccagattcagtttgcaatgcaggactgatccacagtttaagcatccctacttcagatacaatctgtgctacctcattctataagcaaaaactatgtcttactacctgattttatttctccaagtcaggtaaacttgattaaattcccagtgggtggatccctaactcatagataagaagacctgtttatacagcaaatttgagaagcctaacagtttccacattacagtttttctacttccacttagaagttacacaaggagtcaggacacacagcagtaatgctacttaggaaatcccattcttcttggacacagattgttagtacacagggctttcagattcaccttggggtggggctgaggatggagggatgtgcaactgttcgctggtggtctccagtagagctgatggccagcaggagctaaagcctcagtaatacaaagttgcaaagtaaatgaactggaagatgcagggcttactttctcatgcttctgtctggatttggctaaggattggctgagccagggtcattccctgagtagactatattttcttttctaccctgtagacttcagatgctcaccttggaggctggtgacatggcacagtgggtaaagatgcctactgccaggtctgattaactgcttgattccccagaacctacatagtggacagaaagaaccaactcttacaaactgtcctttattctccacatacaaaccttagtaagcacacccccacacatacatacacacatgcaccatatgttcacacacacacacacaaaacatcccttgtttgtgagacagagtagttcttgccgtcaattgaagtacagacagctccaactcttgttaggatcagcaggagtttccagcatcctagacatccatttctgggtttgtggagcatgcaaaggtattccttccagtttgtgattcttgaggataaaagttgctggctttcctttggacaaccacaccagagcatcttgctaggacattggtctcattcctgtgagcttgattgacagggtggtgggaataacatctgccccactctgcagctttagaaagttctgctttgattggaaatggtcagattggtcattccgcgcatatcctgataccaaggttcctttgcaggtcttcaacacacattctaagtttccccagttaaaaaaattatgccgctctctgtaaagcacaaaactcgtgacactgtataatccaaatgataggctggaaactgggtttgttgtaagtaacctatgaacagcacctggtgtaatccctgttaacacgctcagtgcctagagcgaaactggcaagcacagcttcaactcttgccagtcacttgtcaaaccccaacctagggttccttccaaactctcagaagaaggtccaagacacaaaacctcatgcagtcctcagactctaccagggcaagggctggatctcagccaatgtaaaacataacctccgaattagaaaaggaattctgtagcgttgggcaggggcctcgggtgtcaagatgctgattacgaatgtgaagggttgtcgtgtcatgcttaggagtcagagtgaggataaaggtgaaacttccttccttcagcaggtctgctcccgagaagcatgctagagatatagaaaatgcttccccatccatgacaaacaaagaggcaccatcttctccagcctaggattcagcaatccgaatgccagagatcagagaggcaggcaggccgtgcaaagcaattttgcagatctttctagagggtgcgtaattgagtctcatgcaggcagaatactggggagggatagttacaacacagtcaagatgttactaggcactgtggtgctgcaggcactgtcagatgctttttctagacattctgacaactttatgagattggtaccaccattttcccatttcatagacaaagacagattccatggttacaggagacagtctgaaatgactcacggtctggtctggtataacttttaggactctgggattactaagtcttggctttgccacttatgtgacctggaggaaagctcttaatatcttttcatccctattttcttatctgtagaataaggaaaataccattatagacatcatgaagctgtaatgcagatgaagtaaatgggtatatatgcagcccttggcactgggcccacatagcgtaagggctatttatattctgtggtacttatttgttctcagtcaagtaagagttttgaacctagtttagcctaatggtgggtctgagttccttgttaatacgactccctcgaagcagttgggttaaatttgttcctgttctttgattacatgtaagaggaaatcagaagcctgctttagcagtatcaggagagctcaggtgtcctggaaatacttttgatccacagagcatcttttcaatgaaggatacttgctattcaggccagtagtgagaattcacatgaaaatgagactgtgtgagctgaagggtaaacaactgcatttttgctaagactagtcacacatttagaggcatttggcagccagaagtaagtctagtcctttatcaacacacagacagagggttgttgagccttttgctaaatctggctctgagacacttctgtctttaggtccaggcagttgcttcattgtgcacccatgctgtcctgatattttggtactgagcacactgctgtacattcacaggacaccagctgcacgtgtgtatcatcctctagacaggggtcatgtgccatataaagttatcatataaaccgacggatggcatgcactttagagaaacaaacaccagacaggtgggcagacaagattctgcctttctgatgagattgaacttccccctacagtcttagcattacatgactggaatggtcagtttagcacgatttcatcacatcttccaactggagatttaaaatttatgattgctataattgtagataagatgtctctagataaagaaaagcagcatagactgaaaccaaagagcagcagtaagtcccagccccctcttgccttgagagacctccatgaaaaaactacctatattaatagaaagaaatgctaatggaatattttttaaaaattacatatacagtttccagtttgtcttttggaaattacacctagctgttcatgtatcaggtcttctcatgaacacatttaacgtacaggctttgcacatatgtgtccatagagactaggaatgaagctctcatagttatttgaagggccaaggtcttgccactccctgtgtatagtcaagccaccatgcataacaagagagcttctaagatattaacacgtcccaaatttagcatttatgttcttgaaagcacttcctttccccataaagatctaactgaacattagaagttttgaccttttagttttttttaaagaagtgtttgatggtctgattgttttcaacaaaagaggtctgttctcttgctgtagggagagattcctcagttcttttgagagagatgaaaaccctctcttaagcctgccagagtggagatcaagggcatcccagcctgtctctgaaggatgattcctgtccatgaaaggaaactgggtggtagtgggcatgttgaaaaccaatgggcttggctctagaacttggcattttattcatggctgtctacagggtggctgtcatgccttgtgactttttgaatatatgttccctgtgaagatctgctggcttttccaaggccagtgtggctctcctatgggatttgatatcataggatccattttcctatgaggtctgtttcttcaccccaactaacttgctgagcctgtctggctctttactggcagcactacccaaagctttctgtagaaggttgcgttgcacatccaggggccaagtcggggcttcccaaggaagagaggcccactccgctccagccctggtctcagatccttaggtgctgcttaatcatcagctttccagatctcagaaccgctgcatcttcttagcaagtaggtcaagtgagggcagggacaggaagtcaggggctgcagctagggggaagggtggggccctgcgccatgtttgaatggagatagttttctgcctatccctgctccttttgtctctaggcacagatggcttcattctgtacatctttcccccatttcttcctctttcctatccttccctttcttctctctccctttccgttaaattcatagtggtattcaggcccagcgccattttataatgaggtttaaaaaatggggcacagagagtataacaaaaactgtcaaaatttaaagtgaacaaaccctcaatttccttctaaaagataaactacatcatgcctgaactttggaaaggtaattatttcacaataatacacaatgttgtaggagaaaggaaagaaggaagagaaggagggagggagggagggagggaggaaggaaggaaggaaggaaggaaggaaggaaggaaggaaggaaggaaggaaggaaggcaggcaggaagggaaagcttacagtaaacatccataatgcctacctattgtgtataattactgggctacagttttctcatcaactaacttcagctctatattagtaatcaattgaagttttgaaaacatgaagagctatatataagccattatgtacagctgtcaatctgtagcatcccttcattcaatcattcttttctgaataataaggattgaagaatgattactaaatctaatcactaataaattacatagatgtggtacacaggcatctcaagtaacacaaacctgcttctacaccacccttacatctttacagaacatgtgtgattcactttagttgatgcttttaaatgattatggctttctatactcctagcacttcccacaggcaagttgtataggtaatttagatatggttattttagaggcttttcgtaatttttgactatttggtaaccattagaccatcttccttgtgaatgaatacatacattctatagagagtagagagtgtgccctagagattcagaactagtgtgttcctttcatcccattactcagaataccaccttatatggcttggggaatatacaaaattagatacactgactactaatgttccaagtctgcctttctcacaaacactactgtgtgttgggcacagagagaagagagatcagcaaatttcagtcaaaacttggttcatttgactgaaagctatttgtttgtttgcttgcttgtttgttttaaggctatccatctcagatcctcctgatagccctatgaactaataatttgtccaaactcctcctgtaaatgattcttaattccatcaccatttgtagctccctctctgtccaatgaaccagaagttagcctgtaaggcatctcttctttaatctatattatggtttttatctttatatgcaaattgatctatttcctcaaattagtgtatggtcttaagaaccatgttattatttcacttttctggtgtcttgtgaggacaatgaaaacaccaaaggatgtcacaaatgggagacagctatggggacaccagaaccagtgcctttaaaaataaacaacagtgtgcatgtcaaataaaatcttacaagattttcaacataccaactccataacagtaaggttactcttttagaaatgggaccacatgggagggaggatgagttccaggtccctcacctccagaaggccctggtttcagtggcctctgatttctactggatgagagaggcatttggagataagatcagtggctcggcattttgatgaggagggaagcatccattttcatggctttgacactttggtctcaccagagattagacaccactaaggttccttaatcccatgaatggggactgtctggagtttgcatggcccagtaccttagctgctgacttttttgttcaagactctttagcagcaatttccagtttccactcacacctctggtgagaccaaagtgtcaaagccatgaaaatggatccttccgtcctcgtcaaaatgctggatggctgctggctcttctcttgccattgtcactggtcctagtgtaagggtcactcggggaggccagttctttactactttctgtggttttcttcacatgaagcaaattttaaaaaggctgagagtagaaggctggctgcccagcagcgggcaacaaatcctctctcttgaagacagatccggaaggacactgcacgtccactgtgtgtggctccttggagtcctggtgcccacaggagagtggagagcgctggtggcatctgatggtccagtccttacttctagagataggaagtggagattcctagttccaagcttctgagatgttccttgctcagtgttttgataagtagaacaatgtgcttccagagaaattctgtcagtagcgtccatgtccttctgtttcaccaggctaagcagccatttttatatttaaggtctacatttggttcagtagacaatgtggcacactgaaggaggaaaactgggctccagatcccattgccgactataggaccatgaacaaaaatgctgactctcctggatcatagcccgtcagtggtcctggttccagttgataccaacaggaatagtttataaactataaaagagtgtttaaagtctctttcccttcactactccatagagttatttgctcggttattatattaatgtgttttctaactttcaacgtgtgagtctttccatctctttaaacagagcaaatgggagatcttgttttctgctaattatttcagccttctccagagactcatttcaagtctccttccacatcaagccattaggccattgctttggacccatccaccagccatcaaaaagcatcttgtcagggctgacatcctgccaagtgcacctcattctgacagtttctttggtttaaaaaaaattttttttattattttggtttttcgagacagggtttctctgtatagccttggctgtcctgaaactcactctgtagaccagctggcctcaaactcagaaatccgcctgcctctgcctcccaagtgctgggattaaaggtgtgcgccaccacatccggcagtttctttggttttgttctttttcttttttcctgtttttttaaattttttaattttattaaccatctgcatagatgaactctttgcaacttttactttttattttctgctaagtcacacctctcccaaacttcagacattaggattcacttaaaatgttttctttactgtgaaaagaatcaagcatgcagaataatacatgaatattgacagattcccagttccaagacacataacaaagccaacacctatgcaccaactgcttgaccaatatcaacataagagacgatcttatgtttcacttttcaagtaaatatccagggtctacttgtatccagaacttgtgatatatattgacgaccgtcagatcatctggcctacagaaatagttcacgtcattaactaggcatgaaatctaccaaccagtaactgcagggcaaaaagtcgtttgcagtgagaaatacaaacaggaagagagtaacagttagttacctctgggagagttggaatggtttccagaggatgtgacttaaacagttaagggtgatttgcttgggaaacaagagcattccaggcaatgtgttagtcttccattactgtaacaaatgccccaaatcaattaacttaaaaagaggaatttgcttgagttggcccctggctgtggaggtggtaggctgtgaccaggtggatccatggcattagaatacatcacagtgggagaatgggatggaggaggcctctttgcctcatggcccagagagaaaggagtaagagtagagcacagagtcttcagctctgcttgagggtacacctcagtgattaaagcctccaccagatcctacctacctgaagcatctaccacctcccagcgaaaccaagctgagaagcaagccccgaatggctgggcctttgaggacactccatccatactacagcacaggaggaacacatgccctctgagtgtctgtgtgtcccatcacgatagctcttgggccaccccatgatgtccttcatggctcttgaccattccttctcaggtttggggcctgcacctttctaaatgcccacattcccgtaggagtgccattagacgtctaccctcaccatgaactgattcattcacccatttactgaacaccgagaagagcctgccggctctagcctacctgcagatcactgacggagcttgttaaaggctcaagtccagtctctggaagctattcaaaatttggagaagaaggtccaggcattcagagttctaacacattgccactagtggttcctaaggcagtactgtgaggacccatggaaacacaaggaaggaatgtcttgtaatggaagagagagtggtaaagacccctagagaaccaacctgctggttctccttacctggatcaccaagacacttcctcctggtcccacccctgccagtccctctggtctcacccaccctccagtctgaaacactcacttgtgtgtgcacatacctcccctccccctacaccatgtctccaagtacctgctcagggccagtctttcctgcaggtctactcagtgccttgccgatgggtggaacatcctgagtagccatagtcactcagtgaagaacagcaggtaaagttaagtatttcaatgtgacctttgcttggcttctgcactctttctgtcaactacttcagggggagaacgcagcagggaaaagcagagttgaagacaaagtctaaggcaggaggctgctcttctctgcatgcatttccattaccagcagcacctgaacaatttttaagacaggttaactgtgagcctggtcacctctactcactaatgaaatctgtgcctgtagctctttctcccctggggacccacatctgtgtatgtctacaaatgtcctcccatagagtctcacacatatgcacagaaccttggtatggccggctctgtctgaacacacatgactcaacatgtacatgggtatgtaattaaagattttgaacacttggttttgatggtctgttttccaggggtcttgttcagaagattcctgagctactatgggctaaggaagagttgcagcaagtgtttttcggctgctctttctgtaaagtgccctctcttctctctctctctctctctctctctctctctctctctctctctctctctctctctctctctctccctccctccctccctctctccctccctctctccctccctccctccctccctccctcccttcctctctttccctcctctcctctctctctctctctctctctctctctctctctctctctctctctgcccctccctgcctgcctgcctgcctgcctgcctctgcccctccctcgctggctctctgagatagcagcagaccgagaggctggtgcagcgtgctctggggaaagagtgagcttgcttgcagagactggcagcatttcaggcagctcctcttgcatcccatccatgcggtgttcttggagggcaatgcaatgttggagcagggattgacctgcaccgggagggtagctggttgctcagagaggccagggtcttggcttagccagaggctggaatcacaggaatgctgtagcagggtctgctgtgaaagttcccagacccccatggattttagaatttcccagcttcttctgcacctcagcacactctcacttcctcccgagatggccccagatctgcaggagacacttgagagaagctatttattagcagtcgcgaagagacggattctgcgcttggttctttagccatgatttatcagtgatgatggattggccagcggtgtgagtaatgaatgcacttgtgtatattcctctagttacatgctctgtcttatgtgctttgctttttaattctaactttctcagcgaatttccttagagaagaatgaaacctaaatgtgcaaaaagtatggctaagaagttaggtgggttcagatttctgtgtgttttcctattatgtaattggcgttctgaatacatatcagccctatcgcagacacacaaactattggcacagaatctgcaaacgtgctccagaggatgagaataaaataggaaggaagcgaatcaggattttgcactggtagtcatccctgtaaggagacttattcagagttgtgaaaatctttgacatcgacacctcttagaatcaaagatggaattgaaatgcgttctcttcgcagggtcatgaaaatgaagttagcctatggctttcagagcagattctttctagctacatagatgcaagattgataaaaagaaagcctaaggttcaatgctgactgaatctccatgggcttcagctttgcctgagacggacccctccctgttctagcggacggggtctgggctgagggtactggtgaggtaagagtcagccgtgtgagagctcgtccatctttctgtatgtgctagaatttgattcaagtacctcagttaccaagaaacatgaaaacccaaatcagtttactgtcgcagaaacaaaaagatctaaaagttaaagataggatttgcatttttctcacatatgaagcaaggtcaattctgtgtaggaagagccacttaagctttctagattaacacatagtcttttattagagatctttaccatcataaatcacttgagcatggatgctttcagtagaggatttttttttttggttttgcttttttgttttacagacagttgtaactgtcccctttaaagtccctttggtagcagtaactatttctgcccacttgaagctgcgtggatctggaagaggcttttctaagaaggctgttatgacttctctgcctttttggatacaaccccaggcagagctactcccctccacctgcctgccctccctgattgtctcctaccccacactttcctccgaatcttggaccatcatgaaatccccttctctagatgctctgggaacatacccagcccggtcctggacagagagtactgtaaaaaaagcaacccgcagctctgtcaatcaaggcctgaatgagctcagttgattcctgaatattaaatcagttctgtgagcagcagaatgagatcagacctgacccaaagtggtgctaactttattaatcggcacataacgttatcatgagtctccaagctcctgaggggatcagccgaaagccaaactgaatccctggactagtctgtgattcttgccagccaaacctacctaggaccacgccttttaaaatatgtcctttgttatcaaggggaatctgagacagaaaacacatgttggcagcatcacgtgagcgccttggtgcatgaagtggttggtcgaaagaggaaaggctttgagctctgggagctgttttgtttgggtttctggtttatatgaactctggtagactcacgcatctggaagaggtttggtgggggtggggagagaacctggagcaaggcatgcagggaaagggaacatcattaaacatttaaaagaaaaaggcagagtcagacttgagagatttttcttacccacactcgagtcactacgcttttttgggtccccataaaggtaggtatcaattgcaaccttcctgatgagtggggagggattatttcttaacacttttggatttgggggggggaagaatttgctttctccagaagtagaaaggacagtaaggagcaacaacctttcacatgcctgctcatcttaaaaagagcatgcatccctgtctacatttcctccctggtccatgtctcttggtacctcagaagtgttccttgtgggggaaaaaaagagagaaaggcctcgagtccccctggaccctctctgtcctattaagggagaaggatgagcagccaaggacagggttttagtggagggtagagggtagctttaatggtgaatgaggaaaaaggccaggtatgctgatatctgcaagcagtctttgagaggccagtgattggcatcaggaaaactgctgagcaattaaaaaaaaaaaagaattaaggtgagggagaaagagaaagaggaagaggctaggcgttcctgaggatcctcaaggatagtatagttttatgaagagctgagaaggtctacactggtcatactagaaggttagaaatcttacacttaccagaacctcacaggtgggacaaagctcacatcggggtccaaagttctgccaggaaagcttgcttaagatgcactgttggctctctccatttgctgtgtgagtacttttgtctgtcctggcattctcctaggtaacagcttccattccgtgaagaagggttctcaggaagcatggcctgagagtctcatctctgaagatcagggtggccatggagaccttgtttctcttatggcacacatatgatctgcgttctaattcttgttctgtctcagctgatcctccttatttttgcagcccctagtacttttcttcctcataagatctgtttctcttccataccaccagccctgcagaaaaccccaagtccctggtaggtctggctgcagagcccatccaggcagagagtacatctatttttaacctcactttcttacctagtccctcagagagacttcaggtaggaaacacatctttgatagatttggagaataattacatttaatagcaacatactgtattccttaaaattccttaaaagtgctaagagtggatttgaagtgtgatccccaatagatatgtgagatgatgcacgtcgatcagctcagttgcaatattcctcactgggagcacatctttgttgtacacaacaaatttatattctatacttgtatacgttaccttaaaatttcatattgttagacttgtaagaagagaaaatttgactcatgggaaatggacggagaagttttcctgatcagaggaaaatgttactttttccctcctagacctgcccaaccttttgacattgaaacacaacattgtcatctaaaagtatcttcttcaggaaatgtgcgataaagttaacaaaataaaatacaaacacatgatggtttaagcaggctcatgattttgcattcgaaactctccagggccacatgcaaccacaggacacaggctgggcattcccactgtcactcagtggaagagctgctgctaggtaactgctaagttgtataaattctgcttattacctccacttgagctcctaatctgtaaattgcttagcatctctaagctcataattccagttccaaggaatcccatgcccttttctgacttctgcaagtaccaggaatgtactctgttcacagccatacatgtgggtaaagcactcatagatacacataaaattagtgtaaaacaaaaacaaaagcaaaaacaacattttaaaagagacaaagaaagcaaaaggtccagggtaccaaaaatgttccttacctacttccccaaatcttcatcatggaagagtctagtcaatagaggagcaaagatttttgagtttgacaagcacaactctggatccctgctttgttgagtctttgctgcagtcaggagctccctcgcctctgcctgtgtttgtttctgtgtaggactgtccaccactaaggagagtgagacctgattgtccacgctctttcagcctagccttggggaccaaagcaggagccacccgttctccacagactgggcttgtggtttcccacaacaccgtgtgagctcaggtttctgttgaaatggacttcttccttactgtaaaagtccattgtcctgcagaaaattttctttcaggaaaaaaacaaaaccaaaaacatgtttggcaggaaagggtggttcctgggggcagtcctgatataaagccacaagatggtccagggagccctgtgcagtgtacacgtgtgtgctttgtttatggaccactcggtagggatgcggatgctcatatctgtctacaggcaactgcctttgccagcggggcaaggattctatggatcaggttcaagacagcaggctgtgaaacttggttttcatgttcttttgaccctggatatctccacaaatgagccacctgccatatctgggtgctgggtggatgtgtgtagtgaagccacaagtctgcaaggcctttctctgcttaagggacagggaggaatcccacaaatccacaaatccaagatgtcagctcataaatatgtaaggtctctgtttaggtaataagctcgatagcccaggctgtcatttgcacatcctcttcagctgaacacaaaagttccctgccagatactgagaaaggaagctggaggatgggggctgggaggcgggccaggctgatggctcgggctattctggctactctccacactgctgtcttcaccctactgggtgttttgtgtgggttctctctctctctctctctctctctctctctctctctctctctctctctctctctctctctgtattggtttactgtgtgcccaaaattaaccatgtgacacttggggtgaatctgggtagtaaggaaaaattgtagccaacttttttttagcttttggctaaatctatagaaatttccatttctgtggcatcattactaaaactctcaggatcttaatatagatccagtcaatcatttgatattaaaatctaggcctatggatcaaatgcaagctgggaagcagacctcagtgtaaggacactaactgggcatctagtggtactttaagcattttgtaagggtcctgggattggaaagtgagcccaggaaaacagtgactgagacaggagctgactctgccacggcagtcagccaccaaaaactccttacaagggaggtgtatttctagcagaacactctcagacacacagaagtagagaatgaattgtctttgaatagagagtctagaataatgaggcagggaggaatctgggaaggaatgcctttctcaagtgaaattaccatgagtttctgtttacccacactggcctgagagtgtctggcactgtatgaccttaggcatatctcgtgatgattagaactaaatattgtgcagattctcaggttaggcagtgtttagtgacagatcacattaaacagagcatcataataatggcaaagagcaattgtgccacagcagctctctgccactgtgacaaaaactctggtagaaataaacttaaaaggacgagagccgaactgtgattcatggagtttttcagagtttcaattcatgtcactttgggcctgtgacgaaacacaacatcgtcacagggagaacaaaacggacacttgcttcacggtggccacaaagcaaagagaaggaaaggaggacgagattctgatctccccttcagagcacacccctgtgctcccacttcttctgctaggtccctccttcttaaggctgcatcgccttacccaagcctttcacacacagcctttgggaaacatggaagacctgagttatcacatatcaagaacaaaactcaaaatcacaccatatccttacagctgattggaaacagtagatcgtgagtccataaagagggaacataagaagagactcagccccgtggttatatcatatgtttttatgattgacaggggatgatcatttttaattataagataattgaccatactagtatatctaaagataggatagccatttctaaaaatcctttcttcggaaaagggggatggaggagaaagctgtgtatgagagagaacaggaaaatgagtgtagttgacctgggttcactggaaaaggcctgaagttgtatccagggaaactgtagataaagcccaggactgcacagcactctgtggatcatcctgtcttctcatggttgttgtcagcatgctctctgcacttgaaaaacccacaataggggggagagatcctaatgagccttctaaagcacctcaagtgtgggataatgatttggatacttctcatagcaagctgagcatcacagtggctgcagaggagtatcgtcttaaccctaagagtgtccttacagctcacgtgttctctaaagagcaggattctagggaactaaagtaaaagagcacactcctaaacattcttggatctcttcatgattctccctctccttttccctgtctgtctcccttctctctcctctctctctcctctcccttctccctctccctctctctctcctctcccctctccctttccccctcccctctcctctctccctctcctccctctccccatttctctctagctccttctctctgtgtgtaagtcttaggcatctgctcctcagatgccccttatcttgtgtttaagaaaaagtttctctggcctagagtttcctaactaagctagtctagctgtccagcaagcttccagtgatccacctgtctctgcttcccatctcattgttgcagagatggaaagtgtgtgccaccatgcttggtttcctatgtgagttctgggatttgaactcaagtacacatgcttgtgaggcaagcactttgtaggtgacatctctccaggcttggtgcaggcattctttcattcagaaagggccataaagcccttggcacccataggataaatacttgggcagccatattggctttcctttccaggagcttaaaggatgtgtgtataaatgatatttgtgatgaacaagaaaaggaagcttaaaagagcaacaggaagttgcctaacaaagtgatatgagagagagagagagagagagagagagagagagagagagagagagagagagaggttttaacttacaaactatagaaacttatttccaagtgaagttggcaatggtggcttgtgctggagagctttctggattattgtagaacatctatctatactggttttatttttagaagttttaagcatctagtagagtagaaaatggtaaaaatatgtatttggcttatttctcaggaaatgcagaataggattcgaattgaattattgtcattattccacagtctaatgagaacatgcccaagagcatgactgtcaagggtttagtaggcagagtgctgcatgcctatgatcccagcatagtcctgcaggcccataatctcatcatagtaacacatgatcctagcatagtgctgcacacctgtggtcccataactgaggagatagaggctgggggagggagtgtcttgggtgaggctgtacatagtaaactctgtctcaagaacatgtacagaaagaatatataattttgaggaaaaagactatgctttcataaaataaactacagactagttatgggtggcttctcagggcatccctctgctctgaaaactaccccaggaagaagccagagacatgaacttgatgtcctctggagaaaagagagaacgccctctcctgctagactggcagcaagtggtttccttgctaaaggtcagaaatggaaaaaacaatcatctaatcaaattgacttttagaattaactttgcaaagcacaattcacagggagcccagaggcatatttgtgtcaacagataacttaagaagaaaatctcactcccaaaggcctggcaaaacacatgttggacacagattaataatgatgcagaaaattaattataatgaacacaattattacattcattctgtgaatgtgatagcctagaaaataacatattaccatcatcacctggaagccagcaaacattaagaacaaatgaaagacccattcatttatttattctttaagtatttgtttaatatctactaggtaccaggcatcattccattaaagaatattttcattgaacctttaagaatttcatacattgtattttgattcattgtattccactcagatacaccatctctttcctccccctccgcccaattttctcttcacgtcttctttggcttttaataacctgtcaactcaaatttaagttgtccatatatacttttatatacacagtacactgtggattacctaccaggagccatacccttaaagaatatggacttcccctcccccagaaaccatcagttgcccatcaatcttcagttatgggtgggggctcgtgaaccccttctccctctattctattgactggtttgaacttgtgcaggcaaccacagctgctgtgaattcacaagtacagctgtcctgtaatgtccaggagacatgtttctaatcctaccctcatcaatctctgactcttgccatcttcctacttccttctttatggttcccaagctttggggagagattagtacatagatgtccagtctgtggctgagcactctattccctaccctttgatgagttgagttctccgatgaccatcatcagctcacaaatacacttctctgttgagatctgagagtggtactactctatgagtaaagagaaatgaatttagagtacagtttgatgctatgtccacttagcagaataactgtccatgattgtaggcaccatgaagtccttacccatcagtgcccattggttcccactgtaactgtccacactcagcaccagcgctggctacctgcttcttcctttggagcaccacaaccatgggggaacatgtggatagtgagacagaaaaacaaagatcctgggcaatcagagaagcctctggtttagagggccacactaaacaacaacaacagcccagaatcatatccccttatgtacagtgaagttcctgttaaggtaccctgccaagcttgttataaattatggacaaatgcatctgaaagcatccctgcagggcctctgcaccggagaaatccttagttaaaaatcactccagatagaccagtgattctaaactcattatggaggaggagaatatggggactctaaggctgatcctgtcaagaagtgcagccagatttatattttctgtaataccaatgatgtaaactaaccctgtctatcctcccaactgttcatgtactcaacaatacactcatgcatgtatccattcatccattcacatatgtgtggtttgcatcctgttggggaatacacctttagaaatgagagctggcttgtgaccttaaagagctttcagtcctgtgaggatgatacaagtacctgcagccaattgtaagaggtggtgtgtgtatccctcctatgtcctctttctctttgtgaccatgagaggtatggtgggaagactttatcagccttcatgaccagtgtggaaaacttatcttcagtggaccatggaaagtggtgctggctcaaattcagtggggaccagctgtgtcagtttcattagtacaaggttttggtcttgtgtgtgcattgattttgcataattctctctacgtgcccccaagacacagactatttgaagttgtagtagacaattagttttcttttccctggacagtcttgtctgaggatgcgttgtcagagaagaagccagagtcagtgatcacccctggtgagtcaagggtagggacacatcactgacctcttgatctggtttttggagtgaaattaaggatgtgagcagaaatcttcatggcatctagttcaagctggagatggctgcagtttaccagttaaaaaaccaaaggacaaaaaacaacacccccccacacacacacacacaaaaacaaacaaacaaacaaccctctctttttttgataattccagccatcggggcaaccaaaactcagattggcatagatcattgccacggtccatttgattgctggtaaacataaactaaggactgacagagacaaagggattgtgctaattttatgtcagcttagcacaggctagagtcatcagagaagaggaacccctaatcaagaaaatgtccccataagattgggctgtaggcaagcccggagggcattttcttaattagtgattgatgtgggagggtccaccccactgtgggtaaggccatccctgggctggtggccctgcactctataagaaagcaggctgagcaggccttaaggagcaagccagtaagcagcacccctccattccctctgcatcagcacctgactgcaacgctgcttaagctcctttcctgtgtaagccaaacaaaccctttcctcccaactcatgttgctcatggcgtttcatcacagcaatggaaagcctcagacagggatccaaggcgcctatttcagctctctgattacaactcatgtacttagaagcttctgtgggagactctcctaaaacacacttaggatatagtactcatactgacattttattagcacaatagcaatgacaaatgtttgctgggtgtctctcagtgccaggacctgtccagggattatacacatgtgctaacatctgccatctttacatcagagcaagaatgttttacttttttcttgacagtctgttcctagatgctttatcagagcatcaatatgattttcctcacagtaatatcaggcctgatgatttattcttagccaggcactcaatgtcaaaagattataggaataattaacatggtgctaaagttgaaatactactttaaaatcgatatggtcacttaaaagagcataattatggttgggggatggctcagttggtaaagtgcctgccctgaaagcataaggaaatgaatttgacccccagaaccacacaaaaagccaggcaggggttgtggcattctctgtagcctgctgcggtggacagaggtagaaacagatggacccttgaagctccctggctgaccagcctagccagtcaatcctgtttccagagacaaaagtaggaagaagtttagaaaagatacccagtattgacctcaagaattcacaggcatgtgcatgcacacctgcacacacaaacatatgcacacctgaatacacaaacatatgcacagctgcacacagagacatatgcacacctgcatacacagacttatgcacacctgcacacacagacatatgcacacctgcacacacaaacatatgcacacctgcacacacaaacatatgcacacctgcacacacaaacatatgcacacctgcacacacaaacatatgcacacctgcacacacaaacatatgcacacctgcacacacaaacatatgcacacctgcacacacaaacatatgcacacctgcacacacaaacatatgcacacctgcacacacaaacatatgcacacctgcacacacaaacatatgcacacctgcacacacaaacatatgcacacctgcacacacaaacatatgcacacctgcacacacaaacatatgcacacctgaatacacaaacatatgcacagctgcacacagagacatatgcacacctgcatacacagctatatgcacacctgcacacacaaacatatgcacaccatgcacacacaaataaaaacaaaatagcatcgttatgctccagattctgcagaatacaagggaactacttacattaggagtctaataactaactaatatctatttaacttaggagtctccatagaaaaatcattattctgaattttgtactttgcacctatgtctactaagatttaaaactagttcagtgtgcaatttattgtgttctgggtccatttatagaattcactatgtaattttaaataaatcttccttttgttttgatcgatttctctctttctcactatttgtttccagatggttttctttccgtacagcttcagttaatcgtttgataatcctttccaaaaatgcttactaagtaactattttatatgacaaagaagtaataagaaataacatgaaaagttagttgagaccaatgaaataaacaagaggactctactgtttttgccttatttttaaattcttcctttcttgccccgccctcgtcatcattgtctatcccccattgcacatgcacaggcttgtactggagcacgggggtgggggtagggatggggaacaacatgagcggctgcaacagagaaatttaagtgggaaagatgcttagtatttagtgatcagtctactgcctatcaatggaaatgggtgcccagacttcctccctctctcctcggctacttcatcacctaactgccccgcccaacccccatagagaccatcaaataagcaagtatgtgtggcaaaaagcaaagcacaggtctttgtagcagctttgaagcaagcttgcagaaagcatttccctggtagcctgtatggtccgtgatgactacagaatcttttccttcacagcctgttttgttctatagtaatctcacctgtaccgcccactccgtggagacggcttgtgccctttagtaaaaccagagagagctgcttccttgtcactactctgcagcattgagcaacctctttttacagtatctagactgagcaaggcagtctggtagcttgcccactgctatgaacagagtacacaagagaacactttaaaggacaaacgtttcattcggactcatggtttcagagggttgagcctacagtcacgtggctctgtgcttctgcggctagaatgaagcagaagaactctgtggcactgtgtgtgtgtgtgtgtgtgtgtgtgtgtgtgtgtgtgtgtattgtattgtattgtatacagaagaggggaatcagagacaagataccctcaaagactaaccaccagaaacctacttcctctacctaggtcacaactcctagtgtttttagaacctactaagataacaccaccagctgaaggccaagcccctgacggattagtcttttgggagcatattttataacccagccataacaagggtgatgtaaatttcaacctcttacacttccgcagggttgccgaagtaccagcagtccataaccacagccaggaatctagggcagtcctaccttgcagcggagaccagacagagagtgacccacttcttgctcagttccatacagttgctgtgcagagcccccattcagatggttttcattcggaatgccttagttaatgatttcttcagatttcacctgtggtaaataattttgaaaataaaaatatggcagggaagaaaatcacttcttctatcaagtgaaacttatattcaaatttaattaaccaagaaaccctcaaagcagatagcatgtcacatagcattgacaattaattagttttgctctggaaaaaaaaaaaactgtaggcatgagcaaagagttatagattaggctttgtttcctctgccaacactgcccatttctagttctcacaccttgacagcagtttgcagcttcaggcaacacattgtatctgaagtgtgtaactccgtgtcagttttaaatttcacataagcaaaatacagaggaatgagcataacacgctattacttttataatgaagactttagaagtgagcagcaagaccagtttccaagacagtcttgtgccaaatagagaaggaagataaatcttaaggaaaactcagaggaaggaatggctgcccactggctttgagatggacagcctgtttctggtagaccatgggacctcttccttttaactttacattagcacatggataagtgacttagcccaatgtaatgaagagatcattacattcattggagccttgaaatcagattagctggaatatgcttattccttgaagggattttaattttggttgggcagtcctcatgctgtgatagacatacatccatcttttatgcacaattgcatctcagcagaaaaattgagcacttcattctctaaggagcagctgtaactcacctatggttatctttttctgcctgtaatttatagacactctaaacaacagtcttatagatgcatggtgtcttagtcagtgttctgttgctgtgaagagacaccatgaccatggcaactcttataaaagaaagcctttaattggggctggcttacagcttcagaagtcaagtctgttatcctcatggctggggagcatggtagcacacagacagatgtgttagctgagagttttacatctgggtcctcaagaagcagcaagagagagacactgggcctagcttgagcttttgaaaccccaaggctcactcccccatgacacacttcctccaagaaggacgcacccatttcaacaaggccacatctcctaatccctctcaagtagtgccactctctaatggcctagcattcaaataaatgagcctttggggttggagtacattcctattccaaacattacacatgctttcattaattgcattcaatagaaccagccaattttctattactcattcttagagaggacagccatcatgtttattaacaaaaaccatttctatctggcattgggtggaatatgtaacttgcatttccagttaacttaggtctgttgtttatggttctcatttgcttcttgagcctagtttgcacaggcctgacacgggaatgggtaagaggatatctggtttccttggtactgagcatgtttgggtctgggcagatagaaaggtctttagacatgggcttctgggaagaagggtttgtattcgtttcagtgccttttgccctgataaaatattctgacggtagctatttaagtatcagtcccagacgtgacaaccattacttttgggaccagggattgtatcaggttaactgctaacacttcagttttttataactcataaatttcaatacaaataccttccctgcttgactcatggcgccgggtcaggatggatgtggtggcataaggatgatgctttagaaaaccataaaacctctcagactttaagaactgctgagaactccagactacttaacagggagacttttgtgtgttgctgcaactgccaaggttggatggattaagaagagtgtgggggctggagaggtggctcagtggttaggaacactcactgctcttcctgagaactgtagggcctttcccagtaccgatgttggatgggttgccatcacctgaaacttcaacttcatgggtttcaactccatcttcttcaccctgtaggtatctctactcccatgtgagcacaaacatgtgtgagtgtgccccctcccgacacacacacacacacacacacacacacacacacacacagagagagagagagagagagagagagagagagagagagagagagagaatattaagaagtccagtgtgtctctatgctatcccttcagcaagatgcaaagctatccatcaggcagatctggggaccatagaagaacaaccctcagtgaatctacagggcagggagggagaagacacagacctcaaaccatgatcattcttttaaacacccattgctttatgatgtcactagaaataaggacacagaaggctgaagagacgggtggggatgatttgtaagagaaggataaatgcccagccattcttacctaaggctaacgtccagtattcctgcacaaaactcaatccattttcaagttatgacacatttcctgtaatgttttaatgtgatattgttgagggtaatggccagccgtgctttgcctcctagcagtgaatgtttatctgaagtcatgtcacgaattatctttctgcactaatgacatggatcatttgcataaaaatcaggatgactccaaagcccatatgttttgtttttcagtctttggagccatagaactgtccttcctgatagccagttaggaaataggaaggcaatggatgtgggagggcactcttcctgattgtgggaattccaaaacgccgatggtatatttcacagcccagccagaaggcttagaaacaggtgctatttcaagatgaggcacggctggtgtttgttacacgtggatgggtatcttaactctctccagagggtctgccttgaaccacaagctcttgccacctcccctgcctatttataatctgttttattatctccgctccctgtgtcattgaccctgtggattttctggtaactcctgtgatctgtcatgtcatcgctcattattagagagtcttaatcctctgagcattgaaatatttccgtgatggcacagaagccctgatggcaccagccgctttcacactaaattgcagcttgggttgtccttcacgtgctgatggaggcgatttgactgtcatggtcccactcctaggtcaggaccctgtcagggcagcaggtgtggccgtgtgatggccttgtcatttttcagatgatccctgccatgtgttgtcccattggattgaatagaccttgaatgatctctaaatttgtgtaaacacttcccccaccttttctgagcttcccacctgtgaacacccctcagacaaatcctcaaggcgtgctcagcaacatgttctgggcagagtcatacaaaagttaaaggtccttaaaaaacaactctgtaaaacgagactgtgggggaggttatgggagagggatggtggggtggggggaacttctcaacaacactgtgcttgaaagatgtcataatggtatatagtatcttacttggtaaactgaagactaaaaattaattaattaaatagaaggaaagtttgtaaattaaaaaaaaaaacaataaactgtattgcctgatttttctgaccaatctttaaggaaagttctactctcgtgaagctagtaattcttcaaaaatgttaaagtctatagtatagtgatcattccacatcaaggtagataggctccgatgtagttatcttgagatacactgaagatttctatttaattgcaacacacttttgaaagtccagaatttccatctaataaacagtctatcacaaattattatgtatatataattatgtaatttgtatatattgtgcatatatttacatataatatgtaatatgtatatcatttatgtattatagatgtgtatatattatatgtatatataaatgtatgtataaacatataaatacgtacatgtacataaaatttaatttatatataatgtaatatgttataaataataaaatacaaaattgtgtataataatgtaaatagtataaatgatagaaaaaatccttcctaattttccactttatttgacagctggggcctaaaatgacctccctatttaaaccagttaaatctgccctgtgaatattgatacaaatcagcttttagctctgagtatacctggccaatgagaataggaagccatagcatgaaggtcatatcagttctaagttgatttctaaactcacctcgatgtggtgggagaataaagaggtgtcgaggaagggtggagagcccggaatgtagaaccatgcacagtgggaaccatgcgcagcgcgcctgcatcctctcctgactgggatggtgcttagcacggtgccactttctcgataggggctcagtaaatactaatttcattctgctagggagacagtctttttccttgatgtaagcactgggaagtacaggaagttaatgggtagttagaggtctgctgagacgaatggcttcaggaaatatgtcctgctgtcctcataggaacaagacaggtaaatatggccttttgggttcatttgctacttgaatttttttaaaaagcaactcacctgttttcccttatagggtgaggggggtaaggtcctgtggggcatggatctcacaaaacatgcctctagccagaaatgccaaccttttcaattcttttgtgaccacctctccttttgtgtccctgaacaataccatcatacgtgagcaatttctaaactttaaccttctcctatctgtgtgtcattgaggcactacataagaagaattggagcatataagacatgtcagagagctgctcctaatgatgtcaggaggagagtgcctttgtggagtcacagaaactcttaagcgacagcctgctcatttcaaatttctgaaattctcctaatacgagctacatacccattttaagaaaaaaaaaacaatttaaaatgtattctcaaaataatcagctctaattgaatacaattttctggagtggtcgccaacgaggctttcctaagtgtctgggagattgtaggagtctttccgtctgcgtgctgtgagacaggctgcctctctactgcatggctctcttactgatattcctttaaagtgatttttacccaccactcagacactttcagggacaaaatactctatgttttatgaaggtcatttatcaagaatgtgctttctaattttcagaagaatccccttctaattataaagccagtgtgctttatgtctcagctagtatttagctctggtagatttcgctacctaaatctagcccctactgaaaggtaatgtgaggctccttcatctagagtcaggcttagctccagcacttactatatagctcactgaagtgacactcattggtccaccaaactctttgtaacgcttttatttagtttcctaaaagagcctataaaagcagatagtatttttttttcctgaatattactgtggaaaaaccaagtcttggaaacaaagtgatgatgataatttaataacaataataaataaataataataatactgatgttccaggcactacgtgagcatgtagtcagaatgtaggcaaatgtccactgttacctacttagtatctgtactagtcacctttctgtctgtcatggcagggtgtcacggtgccaggagcctgagctggtcactctgcatctgcaggcaggaagcagaggaatgttggtgatcagcaccccagccaggaccccagccaggaccccagccaggaccccagctaatgagatgacggcatgggccttcccacctcgaccatctaaactagatactccctcatagtcgtcccagagaggtcacctaggcgactatagctctctaattctggtcagggtgactaatattaaccagcacaatgtctgaagaagctggttgttcaaattcaggctacatactgaaggccctctagagccgacttcacgtcgtgttagaagggtaatgtcttcttcgtcatgttttcctctgggattcagagtagccttgagcaaggatacctctgttgtcatttatttctctttagcatttttagaggtggttcttctgtttctaccatgctcacggctctttttgcaggaaactaagtaaacttgtttcctttataattaattaattttggaggtcccctcttcccccattcttcagttttcttatcttaggtaaccccaatttctttcagtcatttagtcacccaacaaacatttttgtgcttcttgaattttgccctattggggtttttattctataaggttaatagatagtaaacaaagtagctaagtaaaccactcgctatattactcggtcagagtcttgtctcagagtgatcagagtaacaggaattgggactttgggggtttgtggtgctttcctggggtatctacatttactggcctccatagaggaggaaatgacaagttaaataactgttccacccaaatacatcttaaggaaacaggagcatgggggagaggtgttcacaggagcatggggaggggtgctcacaggagtgtgggggaggggtgctcacaggagtgtgggggaggggtgctcacaggagtgtgggggaggggtgctcacaggagcatggtgagggtgctcacaggagtgtgggggaggggtgctcacaggagtgtggggaaggggtgctcacaggagtgtgggggaggggtgctcacaggagtgtgggggagggatgctcacaggagcatggtgaggggtgctcacaggagtgtggggaaggggtgctcatggtgaggtgtcagttgtatggctgtatggctgactgggggagctgtatcactgcatagcccactccagcatcagtgatgattccagaggctacgtccctgggatcccccatagcatttgcacactgtgtcataactcctatctgctctgtactgccttgatagccccaggcttgtgagttccctgagctttgtgagcctgtgtctttctgcaagaggacggcttcagtcttgaggaagtgagccgagccatgccacagtccctttcttaggcggtcgtgctcgcccctaactcagtggttcagagtggcagtggtcatttattagttttcatgggggtcgggaattcagacgcgatgccacaggtgaggcttctgtccactgcatgatagctgagactccagaggaaaacgccaagggaatcatgaaaaggacaatgtactcctgagcctgtcatctggagaccacgtgactctgtccacgtgatctgggcttccccacaatctttacaaaacccacattgcacttgataactcagccttgagagtcacacaacagctcttccatcatattctgtgggctacggaagttcacctttgaatttcctcttagggtccaggaggaggcacacagatctcacctctcaacagtgagtgtcagtgacagattgtaagaacttactgacagagccatctttacaaaatgccatctcctatggtgggcagggtacatgtgtggttagagaaacatttaaacccaaatttaaaggaggcaaaggaatgaggtacgtgctggtctccctgaggcagggctaggaacgtgaggtggagcgtactggacactggtatggctggcctgattttaatgttcattgccttataatcagagggagcagtgtgcagtgggcgagataggaaatgtgattctgagttggtaaaagaatcttgggtctagtttatgttagaatgggtaaaatctgaggcagattaggtgtgttatgtgagatgaattctgggtgcctgaatggtggggctgttttagtctaagatgggggagcgagtacaggagaagcctgcagaaggagataagccctttagtcttaaggatgatgtgttagggatgtttactgaatactcaagtgggattgctgaagaggcattgagagaaataaacagggagctccagggctaagctgggcaggacacttgaggagtcgcaggctgagatgtgatccctgcagctaacagcagcagctgcagacagaagcaggggctgagccctgcgaagacactggaagagaatgggatgtcccggaagcttagggggcaaggaagaaggatgtgttcttaggtctgacaggtccatgttggggctgagaccgtgacagccatcatacaattattggtaacctatctgagcagtttcagagggttggagacagatgcctaactgattgtagcttccagagaatggaaggggagggcttgggtgggaggttgacaggtggcacttgctgggagtttggatcaaatgagtgcggacagcaacagtgttgcagctagctggggaagtgtcacatgtacttgtttttttctaagagagagagaaagagccaagtacctatgtgctgtatggatggatctcaatgaaaaagctaacacacacacacgtgcaaaacatacatatacacacatgcacaccacacacacacacacacacacacacacacacagaattaaaggccagtcaggattatatagtaagactgtcacctcctcgtgctcccatcaataaaaccatttatacctttatatttacatagaaagatgtgatataatacatcaagaattaatttaaaaagtgagtctaaaaagcgaggctgcgtgaaaggcctttgtctcacaccaccatttgcgtcttcatgacttttctatggcaggattatcatgccctaagtgctacagtgtgcttggatggtggaagatgcagtatgaacagccagcattattaatgatgctgtagccacagcctcactcatgtctccatctgtatcttctgtgacatttggtaccttgaccccccccccttccttgcacttatccatagacagcattttgtatttgaaggtggtactgtacaagagcccgttatccacctgaggagagggtaatctcatgccctgcgcctcgctggagtggataatctggcctgctgtctgttcctcacaccagggtactttatatttctccagtgcactggggggcgttgtattctgccaagccactccccagtcggtcaccaccgggctcttcatcagacgggcttggtttttacaaggtgtaaaaaattttaaatgagctcatctggttcttcacagttgggcttatgccagagaaatggcggtgtggggagggggcaattagcggactaggtactgcgggtccccaaagctgactggcttcattcatgctcaggctgagtgttgtggagaacaaacaagtctttgtaacttgcgatcttggagccatgtggttttatagctcctttctcctgtcccagtgattacatagcttattaattaagttccttgtggtatagcaaagggctgcagggtactgagagtgaaggcaagagtaattaaagggccctttaagagaaagggggaaagtggccagcccagtgcatctgattataccaccttctcctccttactgtctctgtgcagagctgcccagaagttaaatctgtcatctaagaagaagaaacaccggccttcgactccatctgttgcggaggctcccctctttgcgaccagcttcagtgggatcctgcagacctctcctcccccagccccaccctgtctcctgagggctgtcaacaaggtgaaggacactcctggcatgggcaaggtaggtgctagctgctgcctctgccatttgttcagtgggtgtggctctgggaaggttgggaaagaaaagaacaaccttgggctctcattttcaaagatgaggaggtaccagggacaaaaagagacacaagaaagttggtttggaggtcccagcatgcccactttctgggattttgttcatccagggtcaacctctgactgaaaacaaccacagaaaagcctagaaataaaccacaaaggtgctcagaatgacctactgcagtacgctgctatagttagatcctgttcatgttcttctctgtgcctggtgttttaatgggactttacatggggaggtgccacagatctgtaaggtctacccatttctgctgtctgtagactgtcttggcaactagagactgtaaagtcttcttggtcttgcaagtgcattaagttggggatctgatttgatttgggtggggagggaaatagctttgcattgttgagcaggaccatagacacttcaaacttagagatgcaaaagccagaagcagaggccggaggcccagggaaaacaccacatggaagcaagatgaagatattctttcctgtggtgcttctgagtccttcttcccttcaaataaatggtgacttccgcatctgcaccagatcactggtgtgaattctgtagagtggttcagtagctttccagccaagaaatgcagtttgaagttgtcacaaggacttagaaagacgtaagggaagtctgttacaggatattactgggacacatttatgataactttatttataaatgtcaactcttaactctttctctcccaagataaaggtctgcctgaagtaatttacagcctaatcttcggtgggggaaataagttggggcttagaaaaacatgtagctggagagataagtgactctattcattactttcgtcagggtacagatacacagaacgcaagacctgacgttggccttgggtcttgtttcagaacccagctggtcatgctgaagaaagcagagccaggtgtatttttgtccttttgacatcaaaacttggtttaccccagtttatagtctccagatgaccatgttccctccagaaagaccatgcatcctgtgcctgatctccttcattctcttcttactgtttctcccctctccattctgtacccctagtaccaccatctcagagggaagcccttatgtcataatgctttccccccaaagtaaacagattttaaaatgaggtcagatagagcagtggtgagtgtcgtggacagcctccagacttaaaattttccatggtgtttctcagcagatgagtgtcagctaaaaaaaactttcaaggccagtggtaaagaaagaccttaggcagtcatctgtcagggatgctccatcttcacatggtgtagaaggcattggaggaagcagattaccccaggatatccctcccagaaagggagtctaaggggaaaaaccactgaggaagggccatgatgtctacactggagccatggtagctatgagctgagctttgaaggctgtgggtctaagtgactgcaggcgtccttccttagctggggtaaatgcacagtataggtgtccatcacagacagggctaagtgtgcaaggacgtttattttgttaatgtgttgggactcgaatgtcaaaggcatgccacagggcaaggtgaaagctgccatgtctctctcgctcttgcttctcatcagcatcctaccctaaacattgacatggtgtctcttagaaaaggtgccgggtgcttggccatcacaggggactcacacattccatttacaagaaatgctgccttcatctctcaccctggtccgacaccgtctgtgtggatgcttcttgaggtgggcctaggcctaagccttctgtgttaggcttcctcttccctttacccacatccctgaaggactccagggaggccagggagcacaacagcagagagagttcttgtagccagcagtgactctgcacttgctgaggaacaatctggacctgcaagagcacagggaccgtctatctggatttcactgcatgtagcacgtatgtgtgaagagcctttctaatatatatccattcccgggactacagctagcagatcatacatttaacatttgatattaaaggtattatccatctctctcatttgcaattcagaaatgcaacgaagcaccccagtttgctatggaaatgtcatgggcatccactggtgagtcacaggacagatgttgtgacttctatctgatcggtggccacatgagcccttcctctgcttgtgatgacccttgaagatcagtgatggggaggaagtgacacttggagggactatgtcctcagagaggtggtggtaggagtttacttgctatgttaaaaccacagtgaggccatcttcccacatacctacccctccacaggcttcatccttctccctagacgctgcactgcatttgggaactgcagcttctctacccctgtggaaaaaactccactcatccatctattaaaatgatttacattttaacatctcaaataaatatagttgagcttaatatatagccaaaataattaatgctatttatatatgtttgatgaacttgattgaattgcctaaaaccacttcgtgttccaagcctgacctgtgcctctggaatgccatcttaggatcttcagcactcagaacagctcctggcacatagcaagtgtttcctgagtacctactgtgtgtcaggtgctgcagtggtgggcagaggtgagtgcctgtccttgtggcacttaaacctagtgtcttcttccaggcaatcaaagaaatggcactgattcagactgtaccggctggctttgtgtgtcaacttgacataagctggagttatcacagagaaaggagcctcctttgaggaaatgcctccatgagatccagctgtaaagtgttttctcaattagtaatcaagggggttggaggagggcccattgtggatggtgccatccatgggctggtagtcctgggttctataagaaagcaagctgagcaaaccagggggaagcaagccagtaacatccctccaaggtctctgcatcagctcctgcttcctgacctgcttgagttccagtcctgatttcctttggtgatgaacagaaatgtggaagtgtaagctgaataaaccctttcctccccaacttgcttctttgtcttgtttgtgcaggaatagaaaccctgactaagacatagaccaatatgagggaccttgacttaagggaaagtcataattactgacttaccatagctgtaagatgtacaaagaactaactactattaactggctttgtaaagaccgtcttaatagacagattcaagtgattagtggatcaaagcagcttagcccccatttatatctcattgatttggcttatatgtaaatgatacttgtaatctgtttgaaaatggctccttctctcctaagtcagtaagcgctctctgtgaaatctgtttgcacaattaattaacagccgtgttcaaggttcatttcttagtgtgtcacgatgtaatgacagacctcttcatctggggtcgcaagttcctagagaaaagtatgttatctgtgtaacacttgtgttttctggttctgtggctacatttaaagcaaggacagggatggcagctgtcacactggattggtgacagtcccttggagtttagttgcttttcccttccctggtgaataacagaaggggggtgtcggaggcatgagggaaggtgaggcatcttttctctcacagcccccaggaatgtctcaaaacagcggtagtctgtggttgatgcctggtgcctcctatgcctcagtgtgttctgcaagaattggaatcttcctctggtggattccagaagcaagggaagaaatcacacagggttttgaaagaatcataaagaaaccagatgtagcaagtgtgagggggttcattggttcattcagagtacaggcctaccactgctcatggtcagtcagctgtgaccttgcaaggcctcacagagaatcttcctctctgagcagccatcccaacctgggcagcttggtggaggtgtggaattgtggacttcctagggcaacaaaggccagagccattaatctattctccactgtccaaactcagtgatggcttactttaaccgctgataatccctgggcacacagacacaaatacacacatgcaaacacacataggcacacatacagacacacacacagacacacacacacacacacacacagacacacacacacacagaggcaagcacaggcagctcatgtcactaggttctgtgtggttctgtgttgtctctatttagtttcaactctgaagttttctttgtgttgtgttgtgtgtaaactaataacacagaaaagaaaaactgtcatgagtgtgtttgttaggactctggtcttttgtgcatttactgacatcttcagggaagaagtccttcaattactagatccttgtaacactataagacacaattcctgccctgctggtgtcctttttacaatgagaggatagcaataagatttaaattaaggtaagactttcccaaaggtgctaacgtagctattgctcatttatttaacaaggagaaatggcaagggcagcttcaggagctgatttcaggtccatatcaaggagaaaaatctcctgccttccagcccaagaaggtccaggtcacttaaacacatgcaaattatcctgttctcattaccatgtttgcccttcccccatcgtaaagcttttatcagggagaagagcaaagattggagcctgtctttaaaattcatttttagtatatatgaaataaaacattcggataggaaggaaaattctggatcccggcagtcagtcactgtcactactccatcttcagtacaaatgacaggaaatgtgaaccatgacatcgctcctatttttggtgtacagttgaggaaaaagaagtgggcctggctgcataaataatacgcattcatcactatgctcatctgatagctctataaattaaattgttagctcttccgggaaataaacctgtgtgaccttccactccctaattgcaattatgcctttccatgctaagttgattttggttgcttcagctgaactcacggagttgtgattggttgggtggtgtcttaggttttactgctgtgaacagacaccatgaccaaggcaacttttataagaacaacatttaattggggctgacttacaggttcagaggttcagtccattatcatcaaggcgggagcgtggcagcatccagggaggcatggcgcagggggaacggagagttctacatcttcatctgaagtcaaacagaaggagactggcttccaagcagcttggacaagggtattaaagcccactcccagagtgacacacctactccaacagggccacaccttctaatagtgccactccctgggccaagcatatacaaaaccatcacaggtgctttggggtttgttttgttttgttttgttttgttttgtttcttattctctctggctctatgagtttgacgctttctttctccagcctgtcaccagaggaaggaaatgtggagagatcattctgtctctttaacctttgtgaaattgtttttttctcacatgaatttggacttccactcagctctaggatgtgccaacctctgggctgcacagacttgatgtcactgagccctggtaggagcctggctcccaggcactgtcttgcagggaacacagtagacctaagtcatagaaacttgtctagagtagccagctactctgacatcctagcattcatcattcttgcagatggaaggagacctcttaggaaaatgagctccgttaaaggccactagcgagaagaggcataaaaagtctcttgtgaattaagtgtggggtgatttgtattcctcctgaataatgtgcttcctttaatgtggtgggttgtgtgggtgtcattttctgttgtctccttactcaggtgggcttgaaggggtaggtggtacagttccatgaattctagtatgacagacatactacatatgaagaccttaatttccaatctcagatgtttgcagaatgttgcagactgggtgagaaaacctcgaggctgttgaggaggaatagcctggtgtgctgtctcctggcctagctctcctgatgcatgaagggaaagtgtacagccagtgtcttcatggagacggagcattttcagattcacttaatttttcatacagctcttcaggtgaggaactgggtggtctgaaaagtctcaaggatagaaagatctccaggcataaggcctttccaggaaatgctcatgggcaagcctgaaatcagatcctgagtttccagggaaggtttttttttttttttttttagcttcccctattaggttataagcttcttgggaggaaaaaaaaaagaaagaaactgctttgaacggttttacataattcctttttgcttcagagtctggggtggacgttgaacactgcatcgtccatgctgagagggaggggaggggacgatgcagagaggccaagaacgtggaaatgaggagactccatgtgcctggtcctggccacttcttctctgtgcacaaattgtcctagaggacagtgcccatgctatgtcagaaaggtgacagtgcccaaggctggcccccatcagacaacacatactgttcccaatctgaatcttcataaaagccactccgtggagcctgtacctttgatgtgtaaggaggctaaggcacggggaggggagcaatttgagtagccatccatccatgggcagaagacacgggttgaagatttggaatgaaaactaaatcagagttggaattcacactaaggcagccttcatctgcttcccaaatctgttattgttcacctcaaatctactggctctgtatttttaggtgaatgaaaataatgtgtgtgtgcacgcgagtgcacacacacacacacacatacacacacacacacacacacacacacacacacacacacacacacatgcatgtgtgtccgagtgcatccatgcatgtatgtaaagagcatttttctaaatagacttttgaaaggctagcaacttttcttgtgattggggatggtcttggagcttcttgggatccccgtaattcccaattagcactgcaacttgtagaataaaaacaagaagtaacatgagggattctctctggaataaatgtcactgtttcaattaaccaaagagcactataagatgcattataaggccaggacaggactttttatcagtcttagtccaaaacctaccttttatcaatccgagcacaaatgagacaatcgtcaatgtcaaaagaatggcagctctgttttatatttctaatatcttaaatcctatgtctctctcactagtggctgaaaattaattataatttgctataattgtcacatttaaatgcaattgctaccaaggttttataaaggaaataggaagtataatgctgcttgtgttggcaagtctgtcttggcgcctaacccgctagtggacgctgtgcttgcctgttgctgatttgcatcaaatagaaaacatttcagaccttcctgatgcttcagtaaactaaaatgtatcattatggatgtgaaatcatttggcatgtgttttttttaaaagcaagatatgcattcttcagattgttaaatagttgctgaaatcaaaaacccatctccacccagagtcacttaaacccattgtgtccttccctgtggctttgagctgtagctctgttctccaatctgtgatgatgacatctaaacagaagtagtgattgtatttggacttccagataaagcttccaaaagcagtgatattcgggagcattttggaagtgttaagcacagatttccctcaaagccactcccccgttcccttggttacctgagtcccatgccacaaccaacaattcagatagcagtgttgccatgtggagctcaggggaatattctttactaacaatgactaagctggactggaaacactgggccaacggtagctaatcagaggggtggttttgcttcatgctttctttcgttgctgaaaccattggtaaaattaatgcccatttcttaactgagagctggttgtagcttcagttctcttggtccagagcgtgagtttgagagctcccgtgtccctcatgtggcaggctcttaggccaccacatgctcatcaccagggcctcacaatgaaagttcaccaccccagagcagccatctgagctgcgtatggatccttactatacattgcaaatccacaggtacaaggttacagcatagcagctatgactaactgtgggtgagagggcagacgactgagaccaagcggtgagttcagctcagcagacagagtagttggtactgatagccagcgggtaccaatggaggaagtgccaccaggaactcgcactggagaaggatagtttggccccatggagatttctgagttgagaatactggatcagtggcataggcgacttagaatatcaaaatctgttcaaagagcatactgcgagttggatgagtgccatgtttagttaccttcctcttgctgctttaggataacctgacaaaacacaactaggaggagaaagggacaacaggtcctctcggcgcagagggcaagaagaccaggctggcttagcagctgggaagcggacagagaaagggggaggggcagacaggaagtagagttagattacaaaccctcaaaacctgtccctggtgacgtacttcctctagcaagactccatctcctaaaggctctgtagatttcccaaataaccaagcagcgaccaagtatccaaatatacgagcctactgaggaggcttctgagtcaaactgaaacaaagtctgtggaaacacttctgggagatcggcatctcgaaggctgccatatccgtccttggtctacccttggctcacgtttctcccatcatgaatcacagggccttctgagtctcaacccatctgcttccccagacatgacccattttatgcgtcatctcgtgtatccctgactggccccctcttttctgttttgttcatgagctattaccatgtttgtttatgcttcaagggtgtggttaatttctagtgagtctttaggctatattagcataaggaacagcagctctcatctcaatggaacaaaagagttggcttattctggagctaaataaaagtgaccctggtcaggaaatataatttcaggttccctagatcccaggttctaacatggtatcaagtccacggggttttcagtgacaggataaagaaagtcatgaatcaagacccctttccaatcaatgcattggtgatgagtaggcagggtaggtgggtcacagagaagcagggggacctcagctagaggccccaggaattatctgatggcatctgtagcttttcaaccagtgggaactaggattctgcttatacactccataggatttacccctaatggtcacagagatgttagatcccatacagaggagggccgtagatggctatgaagtggacctgaagatgccccaagataacttggctctggacttgcaacaccccaacatctcttccccactgaagttctcatctgtcaatcagcctttgtggtcacagctttgcaggggtccatgctcacagctccttacaggtttagatcttggttgactgatgtttcttccctgagcctgagagcaattatgtgtccacaagttacacgtctgccatgtgcttggcagtaccatgttctgggtgtagtttgtcccctgaagtgacatgctacaaacttcgccatgttgagagctggtggattggttaagaggtgagacttaatgaaagagtgtgaggtcactgggctgtcacttcagggacagattgatggagtttgatcccttaaagcaaattattatttatcattattattttattttttgaattattatttttatgttaagaaagggagcatggccctcggatctacctgacttcctatctggttatataatctctccacatcggttcccaggatacatctgccacattgtgattgtagccaggagtcttcagactcaaagcaatgttggtgccaccattttgaacctccaagcctcaaatgaaataaaaatcattttctttgtaacatgcacagcctaagaaatattttttttgctttttgttttttgtttttttggtttttttttttttgtttgttttgtttgttttttttcgagacagggtttctctgtataaccctggctgtcctggaagtcactttgtagaccaggctgccctcgaactcagaaatccgcctgcctctgcctcctgagtgctgggattaaaggcgtgtgccccacgcctggctcagaaatatttttgcagcaagagaaaacaaaccaaaataggcatatagaactgccagaattaaaatatattaaatatagagcatagcagttatatgtgacaattccttctgcttttacctttataaacccatcctccatccatcctccaccattgattgattgatagattcattcattcattcataaacttacttagttttgtattccatattttctaagtatcaagttacttttgggaacactcaaataaattaaattcttttatctcttcttatggatcccagatactgctattctaaagagttaaataatcatacgttaggtagacaactcaaactaaaaatacctattattgttatcaccactctgctttatcgtggcagatgagaccagaatttatgcagggtaattggcttcctggctcgtcgtctgccctgttcctttttactgaggacagcatagtatccctgcagctgctcatcacaccgtggtgacagccagccatgcaggcatcagcgaaggcttgacttccctctgtcttaaacactttaatatgctgcctgcacagcatcctgcagttagtttgtgtggcaaagtcccagcgatgtgtaaacatttttgttcatccaagattgttcaagagcacacaaatatcacttgcttaagacacgtgtcctctgaaatagcaagaagtgatactttgttgaggggttgctatgaggggctttgctcgaggtcagatcatagccctctcctattcttggtcatgactgttcatctctgaggcacctcctacacagtccattcttctttgactatcgatgggtaaacttcatgcattttgaaattccagtgttgtctagcctttcttgggtttggcttcttaataggggatgaccccaagggataggcaggaccttaaagttgtcttgaatagtgcatatcctgtgaggtgtccgagatgagactggggactggaggaggggttgcaccagttacaactcttcttagttttaagcaacagaaaacctgactggtcttatgaaacaccgggagggcctctgtttcctatctcctggccaggaacacccaaatcctgtcggtgattctttatacactgtaacatcgatctctacccctgaccacatttccccaacaactgctgaagtttggagagagcctcccccacagcccaccagcaggctgctgtcctttctggtacaaaccttagaagtgaagtcccaagttggggctcagctcagagtagatggaaggacagagggatggcatgaatgtcaggcagatgggccatcctggagaaagctgggcagttgtgcacgagtcagtcctggtaggcagaacatcaggagtgaaaatccaaaacagaggtgtgaggtagttgtgcctgagctcaggtgaacccctgtgccaaagtgaaggcgatcatttacccagccatcgttaactaagtatctactatatgcatttttgcatatggagggggtgtgcccctgggcatgtgtgtggtgtgtgtgtgtgtgtgtgtgtgtgtgtgtgtgtgtgtgtgtgtaggtcagaggtcaaccttgtgctttctcgggaactattcactctgatttttgagtcaagggctctcactggcctggagctcacccattccattaggctccctagccagtgagccccagtgttcctctggtccctgctactctagcactaaggtggtaaacttgtgcctccatggttagcttcttacaagctctgaggatggaactcagtccctgagctcggggcaggcatgtcacctactaagcccccttcctggcccctactgagtgcgtttgaaatcctgtagcaatcgctgagcctgagctgttgctaatagataaacccaaatgatggtgtggagattcgcttggggagtaagttgtggaaaatcccagatactcctcagcatgttcatggcagctctatgaaccatatctcaagaggttgggatgcagccttgaggcagctccagccgcattacagcgcccagattccaattctttgatgttgatgaggctcgaaagaatagcttccattgctaccaggaggacaccattttcagctgggcctgtttgtttccatcttggtccactttggttcctgctgtcttgagttttgttttgttctgttctgtttgtttgttattttggaattttgttgtttgtttgtttgaggcagggtctcactatatagcccaggctagctccaatctcgtggcagttctcctgcctcagccttccacgttctgagatgacaggtgtgagctgtcatgcctggctcttctttgcctcttaatgcatcgcagttcctctccaagcttcagctcgggtgtcacctccttccccaacctaaagaagttccccacaagtccctgtagtctcttgtgttccattgcaccctgacctaaaacttctacagcatttcttttagtcccctgaatttgtcttccttccctttggggctctctgaaggctggggttgtaactggttgtgctgttccccccccccccccactccatctctcccaacacacggaaggtgccgagcaaacgtttattcattcagactggggagctacgacgtgaccaccatcctgcctttcttctctgaatgtccccttgcagtcactcctttgcccctgtttacttgacgagccgcatgatgctttgtgggggcataggggagactctctgtaccaagtgtcactcctatgccacctcagcccagccttggaaaggactgatcagggatgaaggtaagtgtgtgctagctttccggcaattttgagtctctcaaatcttctccaggaggcagagttcccatgccgatggataagaaactatacgtccctagagcggtactcatgggagatctccatgtgctccctctatgtgcttgctcattgggctgagcataaatgggagggaattctgtccttcctacccaattctagctcggctctaacaagttacaagggttttgatttgctcttaggttggtcatttcccttcaattggtatttttcagcattttagttcagactgaagttttaatgcccttcagatgctacatacaggcaggcaggcccatttgtgccttttactctctataatccttctctgtcttgccagcgtttgttggattgcaaaaggcgcttgtgtcccaaggactagttcctctgcactacctgagtgctgtgcacatgacacacagctccacatcatccatgaaaggggccctaactattcaacacttctttaactcactcactggaaattgtaactatgcactcaactcagtgcattgagcacctgcagtttacaagggaatgtctccgtggatggagacccatttgcccttggacacatacaacccctgcctctaaagactgttaggagaggagaaagatttttgagccatacatatatattgccccaaccacctctcctgagaataaaactccagctgtgatataactccattttaattctggcactctgtttggggttctcagggaccctgcaagtttctgaagtgtaagtacaatcctgtcaggccatcagctgccatcctctgaggcaatctgatgtgaagctgtcaggttgttacgcctgctctcagcggcatcctcttttctgagcacagccttctctctagctgcatctgtcatcatccctcagtccccacgcccaccatgcttcccttagacgctggtggccagcccacggcaggcggctgctaatgccctggactctcccatatgcctggagaaaagaggtgtgggctctggtgctcactttccagaccatagctcctaagggcagtcgtgtgggcgctatatgctacatgctatatgcctcatgggacacctggctgcctgcggtcagtgtggactctgaaagtgggtggcctccgcccctcttcaagaagcaacagatgccttagagccagggcaagcactttctggaaggtgtttcattgggtgccctgaagaatggcagccttcacagtttagaggtggctgtttcccaagatgggcatttgacagacaggaggccgtgctgaaacccagcagttcaaagctgcttccaacttgatcttggcttgtttgtggtgagaacacggtagtatgggcagacattgacagtacgtgggtgtgtggaagagaggaagaggacatttggggaacagcctgggcagctgcagatacagaggaaagctatttggtgtgtatattcctcctgtccccagtgaagagccagcctgaagggccaaggtgtcagcacacagaagctggggtgtgaatgccctccctaagggaccaggatggtttgctcagtgaagagaatgtcagagtattaccttaattctgacttagcattgggatttgaaatccacatagcaaaggtacaacttcctgtgtcttgggcagtagagacaatagctaatgctgatctggtcccgggactgagcacacctcaaagtgtttttacattcagcttttcatttacatacacgatacatttataatatatacatcatttacatatatggcacatttatatgttagttcattgacatacaatatagtaatataccaacttgtttacacgcacgacataatcatttacagttgcatacatcagctcatttatatgcacaatacagttacatgtatcagctgacttacatacatacttttacatgctagctcatctcatttctatacattagtgaatttacacacacagcacatttacatgcactaacacgaatgttttatttctacataaatcatttacatatataatacagctataccagcaccccatttgcatgcactaacacattctttatagtacatttacatacatcagtgaacttacatataaaatgtgtctgcatgcatcaaattacttttatatgcatatttttacacactagtcatttacatacataacacagctatgcagcctgctcatttgtatgcacaagacattcctatacagtcacttgtttctatatagagtgcagttacatgtgccaactcatttacatacacaatacttttactcaccaactcatttgcatacatatacatgtatatacatcggatcattttatatatacatttgcataccttaactcattagaatcatctctcttagagatgagagacctaagcctgttttctgtcatcttgcatctattgatttgactcaggtccattgtatacctgtgcacatcataacagtcatagtgtgaaggtatagctggttaactagtcatttcaccagccagcctgatgcccacagattcctgcctaggcagcaggcttgtcccccagggcttcccaaccctctgcaactcaccctagtacttcagatgctttgcagaactgcatctgtctccctaggcaactgcacatcactggttctttgcctggatcatacaagactacagtcattccccggtctcaaacagtctcttagaattggctatggtcaggctggaagcatttctcctttgtaccaagtgcccacctccaacaacaaagcccaggagtttcttacataatccacagacagtgtgctaggggcagagagaaactaagaggaggaggaaggacaggaatcagtatctagctcaacaatggtgtgatttgcttatattcactgtggaaagcagactcttcaaagagcaaaacttcaggagaaaagaaggagtcttcctgggagtctcgggaggatttagcaaagatcttatgacgctgctgtgttggttcattccacccaggaatgggggcttgggtcctgacaatctgttctgaattttatacacaatagttgtccctatggtggtatgttggccagtcaccttctgtataatactgtttctcaatacacctgttggcctgtggccaccacttccagttctgtctggccagactgtcgtagctctgtggttcccatgtgtgctaggatctgtctgtgttctggccttctccttctgcactgagcccttctccagagcacagtagggctacaacatggctctggacaagcttttcttcccctttcacacagtaggagcacagcagtgtcagctactggatcgccgtgtgttactctatatcaagtatcttcctcagtcactaaaccccgaactcctttttctggagtcacggtctctcactggaacagtttggctagatggggtagtcaaaagccccagggatctgcctgcctctgcctccccacctctgggattccagatgtacacatcctcacccagctttttacgtgggtccagggtctcctagctcagggccttgagtatctcacttactaatctatctcctcacctttacctgtgactactgcaccacacactgcttctgttgtggattgacaagagatctgcccagttaaggaaagttatttggttcctagatgtcagagcagaggggctagattttcagacagacggagtgtctttccctagtgttcctgttccaatgtgaactgcttcacaattccctggagactggttcttctggagaggtgtgtcactggctttggccttgatctctcagtgacaggcccttctctggtatttagagagctgtgcagtctctcagaagagttaccacaccagctcttgggtacagggaagtctattccttgacctcctgtcattcacagatacagtctgtgcttagcagaggtcacttcacgcctgcagtgtattgtcacagattcttctgtgagcctgtagttcacatgctatgaggatatttgcccttctccgccctggagagaaacaggaaaatgatttcctggtgagaaatcaggcacttgtaagagccagatttccaaagaggcaccgctgtcaggggggctaatcatccaaatgacgggcacgcatggctgccttccatctttctgccaccttgcttgagacgagatgagtgggccgtcgggccagcgatggggaattctgttagaacaacatccgcagggaatagctttatctgctaaggatgacaagtgaggccagtgtacacaaagctggaatggcatggccctgcttggcaaatgctacaagacccaggactggtgtatctgttctgggaggcaggggagacgcctctgccaccctgggggtggtggtctctgggcactcttttcatgtggcctcttggcagcagtgatgagctcaggaaatggaggagatggatgatgttttcatgtttcagaccctgagtgatccattgtttccctcttcactctccgtggggatagagatgccagcgtagcaggggtggtgggttggtggggtattcctgccagcaaggcctgggcaacatctgcattattcccaggttgttctctggcaccgcagccgtcacctcccactgggccacccaactctgcctctatgctttcttgttgctggttccgggacatgtaggaatgttgccatggcatctctctaggagccccttaaatgttcctgcccagccatagccacagagacaggaggtagattaggtttccaaggctttggggggtaggaatagagtcactcttggaggcatggagtttcttttgagggtggtgggaatattatggagtctagatgtaaggatggttgtacatttaaatatacttacacacacacacacacactgatttggggctgggaggtggttggtgaaggacttgctgcacagcatgaggacatgagttcagatccccagaatgcctgtaaaaatgctagacatggtggcattagcctgtagtcccagtgggtccctgctagctaggctgtttgggtagttcagtgagagacggtggcacaaagcaaacaaacaaaacaaaaggtaaattacatctgaaggaagatacccaagattgtcctctggcctccacaacgcacacatgtgtacacacacacacactttgcttaaagtgggaaattctgtaatgtgtaagttttgtctccaaaaaggtaaaaggtaaattaaagtagaaaacctaaatatttagtcctgtttcctgggagaatcacccccggtgggattttcttgctcctctggtctgtcccatgctaatgcccaagttcaacttaagatataaggctcgccacatagcacatcgtttctttctatttactatgacctatgaaacccccatctagacctggatgaaagctagcagagtcaccgggccctcatgcagcttgaatgcccaggtctctgtcaggaagcacgctggctagataagaagcagaaagcggaacccactgttccctgcctcctgctcagaacactttgattctctggtgtgaatgtttttataaatatacacatcaacagagttcttgacattctgcccagacctgaagagggacagaagctttctaactgagatggaacacacggagaataagaaacaatcgaggaagaagtcacaaagactgaaggagagatggaggggtccacctccccatggcccctagtgggatatgtagggtacttaggtgcaaatttaacctaaattaaaatactgacttctatgcattaaaacctaaaggtttgcctaagccatcacattgtttaaatacatggatgaagattagtctccacctgaaatcagttccctctggtcacctcactgctcagtttagctctgtagtttagtcccagccccctctctccttgtgtttttgcttattggccattggctgaggtagaaacacagatcttctatatgtcctttggagaaatgaaggccaatgttaagtcagaacttatccagttccagcaggtaatcacacaagaacagggcttgccaatagttggagttgcaccagaaggagcccatgcaggagacgcagccgctcacaagatcttacccccattactactggggctagtgtctcctctgagaggttctggatttcagtggagggtggagtcaattgttccacttgtttacagtggggtcattagtactctcccttcttctttctttgtttgcaaaggctaaagaggtgccaccttcgggggccagcacaggatgacagggagccgaggtggctcttcccacccttacatgttgccaaccccccacttttttttttcttcaaagaatgctgagactaggaattatgattttgagaaagatcattattctagcttctcaaggaaaatgatgtatttacaatttcctgtgcatgcttagatggaaattagattttgttcagtgccttgatactggcttttctgtttacattacaactcccagatgtgtcaggttgctgggttgttgactgcatcctctaactcctctcagagagtggagcttttcaaggcatggagacttgctcatgtgagcaatgatgtgacaagaagacttgaaattcataacattgccaccatgttaacaaaaatttaataaattttcatagggagaaactaggcatgaatagaggttatctttttttctcattttcttttgctttctttcttcctttctgtctgtctgtcttctgtttgtttgtttgtttctgtatggcattcttgatgagtgaattatgttgacctaccagaccatgttgaccatagagtgtgcaggctaaactttctcctgtgccttgcattagcagtgcttgcccggagacactggtgctgagttgatgtccttaaacccctcacttgggaacaaaactataggtgaggccctgaggagtatggtcctgaactgcctgtcacctcatgatttacagagtcagtatcaagattaccactgttgtctaaggagccaagacttccacaacccaagacccttcaaaccctgagattctgcaaaccctgagaccctgcaaaccctgagacccttcaaaccctgagattctgcaaaccctgagaccctgcaaaccctgagaccctgcaaaccctgagaccctgcaaaccctgagaccctttaaaccttataatcctccaagccctggcatttgaaaagtcagatcatcccctctgtgccccatttcccccaatcggacaactgtgtgtgtgtgtgtgtgtgtgtgtgtgtgtgtgtgtgtgtgtgtgtaaatatgaaaatgaaactctggagattcttaagcttggggttttggttttgtgtttttgtttgcttgcttgttttgttttgttttgttgagacaaagtctcgtgtagcccaggctggcctcaagctccttgtgttactgcaatcggccctgcactctcgctatttctgcctctacctccagccccagtgctgggattgcaggtgtttacctccacagccaacctgggtccagactgtgggctgtgaggttgggtcagcagctgtgagtcacccagagcttctgtgaacctggaccccaggtctgcaactttgtatttcataagcaaccatgcatccatgagcattgctgctgctgctctccccgctttgtaatcgtgtttttccttttccttagctctggggtttcaatgtaacatcttagccgtcttttagtatcatggaggcttgtggcttttccagggtggacgtcaatgctggagccctctaggaacttcttgtctttagcccttgtctgtggacagctcagtggggcacctctgcctatacagcagcccctggttgtcatgtatcctgttgagaactggtcacctgctggctacctcgaagcctgcactcagtgtctgaccagccaagaggttcccttgggcttcccagaactcccgtcttctgtaaggctggggagggactcctttatccagctcttccagtaacgcatttcctcaccagtcaccactggctagttttcagtttggcacatggtttagacaaagaggattttgtatgtatcacttcccaccagactctcctaagtggaagcctgggatttggaaactgaggttgtttttctgctctttaaatgagcgactttctggacacaccttgttaacacagtgtagttcctcacgtctttattacaagagggactgcctgagcccatcgggacattctcttactattaacatgagcgcctgtgatcccgtttatatacattagaaaattaatttttgcttctcagaatcatgtgtgatgtgtggctcacatccaagattaatgtaaaattatatactttcccaaatatttcatctacatttcagaatctagttaaaaaaaaaaagatttccagctttcattttagcatgtgagaaagcagagatctagaacaggggccttcagtgatagtattgttaatatttgagccaagtaactgtgtgacaggagatgcaggggtgcctggtgtcttggggaatactccgcagcatgcctagtgtttgctcatttttaaaaattctttgagtgaacagcattgtctgtgtttctgacttacttctttgccaaacatttggttctaatccaggggagaacaaattagattaattcactgccattggcccatggatcataattggagaagaacatcctagaacctttgcacaaaataaataagtgaatgactagttaactgaatgaatgatttgtattcacctctacagttggaaggctgtaggagatggggagagagcctcaggtgggggcaaagagacatcttgatgttgactaaaaacagtctgatgggatccctgctttgtgctgttcctgtcagagaacggccatgactgtaggaagaaggtggaacatttgatgaaacagcagggcttccacactgtcagcccccattgtaactgaagcttcacacatggtcctcatttccctccaccatgtttttctaggtgggaggagggtctgggaataataatagtgtcagccttaaacaacccaccccacagccatgttctgaacatagctgctaacagtgggaaagggctctctgactgacagattgaagaaggactcacccttaccacccctatgccatgagccatgttctgccacttgcccgtgggttaaaccagagagtcttccattttctgcctctgctccaagggtagccactgcctgcaaactgagtcttagagaagcagtgccggtagctacccatgaacctatggaagtggaaaaaagagcctccagggtctacaggaaagggcacacctttgtcacagcaaagtcagtaaagggtctgtttataaaattatggatagggtagaaacaaaagggcaaacctgagagcccagggctggcagtagcaaagcccagagctccccatccaaggatctagcagttactcagtctcacgcagcaagcaggcgaaggagcaagagcaagagctagactcccttcttccaatgtccttatattgtctccagcagaaggtgtagcccagattaaaggtgtgttccgccacacctttaatcccagatgaaaggcgtagcccagattaaaggtgtgttccttaaactcggagattcaatcttctggaatccatagccactatggctcaagatcttcaaaccaagatccagataaggatctccaagcctccagataagggtcactggtgagccttccaattccggattgtagttcattccaaatatagtcaagttgacaaccaggaatagccactacaatccaccccttgtcaacttgacacaaataatatctcatgttcacatgaaacaataacaaggttgtaaatatgcctaacatgatatattaaggaggatggagaagggtagaccgtaaatctggagggcatagaagacattagccaccacagatcagtctctcagcacagccctcttcgcttcctgggactcacagatctccttatctgaaccctgccacactctgtctttggagagaagtctgggcgaggattttccacaccgacctccttcctcattctgccgagctgtaataatgggcagagtcgctcaaggctatttcaaataatctcttttgccattgacaacatgaggtttgttctgccattaaagtgacacaggccctggagggggagaatcctatgttcattttctttcatccattttcttcagtgtgcaatcatctttctcagcagcccgcatctgacagttctggctgtgtgggacacagtgacacagttacttctttggtccacttgtctgctgggttattaaatacagattacacatgagaggagaaattgaactatatactcctgagtgttacgcttttgggtttgggtctcactaccatggaacttactatgtagaccaggatggccttgaactctcagccgtgatagtattaaaggcataggtctcttgagtgacattcagaccatcgtttcttcagacacatcatcaatgcccaggagacctacaagagtctgatctgcctgaagaatacccaccaggttctctatccatcctggcctcaaccaagttcaaaccacgagctttgcttttaataagaatagcactaggttttgttgaagattcattataattgtcataataataaagggagatagaagattctgtgctctcaattaccagaatctcttgtttattgcttgctaccttccacaaacaaacaaacaaaaatcagaagtcgggaatcgggaaagaacagggcacttgcttggaacttgggcaggaactgaggagaggatatggtccaacttctctctgccttctctccagtgacaattgttagaaaagatgaacaaaaccagagagggagtgtgtgcagatttactgtgaggtgagaactcacttcccagaaatggctgctcttctggtttcaggacccacaccaccatgggatttctaagacatcataattatttaaagtgctgttttggggactggagacatggctcagaggttaaaagcactggctgttcttcaaaaggtccctggtttaattctcagcacccacagggcagcttacaactatctgttactccaggtccagtgaatctgccacccttacacagacatgcatgcatgtagaacaccaatgcacataaaaataaagtgctctctttaagggtccctgttacactgctatatcagcacccagtagactaaggcaggaggattgtaaatttaaaaccatcctgagtgtcttagtcagggtttctattcctgcacaaacatcaagaccaagaagcaagttggggaggaaagggtttattcagcttacacttccatactgctgttcatcaccaaggaagttaggactggaactcaagcaggtcaggaagcaggagctgatgcagaggccatggagggatgttccttactggcttgcttcccctggcttgctcagcctgctctcttatagaacccaagactaccagcccagagatagtcccacccacaaggggcctttcccccttgatcactaattgagaaaatgccttacagttggatctcatggaggcatttcctcaagggaggctcctttctctgtgatatctccagctgtgtcaagttgacacaaaactagccagtacactgaggtacatagctagaccctgtctgaaggaggagaagaaagataaagaggaggaaaaggaggagggaggacagagggaggaggggaaggagtgggaagaggcagaggaagaagaatttcttgatagagagtagacagattgacaaatatataataaaggtttttttttttgaaagaatgaggtttgaaggtgccatgctctcagtattgggggctaagggggtgttcctgtttgcaagatggctatcagggtctcagtcttcagagccttctcttccaactagagagtccacagtctcgtggacctctagagtggacagcatacatgcaatggtgctctcagcttgtctgattgttggattgaagatggcactttgcttctttggacctcagtgcattgtctgataatgtcatgcagtgtcagctccattccattggtggagtgacttagtggtctccttagcactgcagtgctaatgggcagttatatgccggtactaccaagtcttgaacaggaatcatcacggcctttggaagtcaaatctatcagatacacaaagaagaagaatgctaaatttgatgtcgcctggcgccaacctgcctcagtctgctgagtgattcgagggtctgtttgcagagagctacacaggttgtgaatttatggtgtgcccagcaagaggctcagtgtatctggcaatctgtcaataaactacactgtagagattcgagtaacacagcagaatagtttcagagacttgttacaacccatcaagtcggataatttacaactttaggaaaattcccccaaatacaaatttacaaaattttgagttgttttatactttctctatcagaccattaacctaaaattaaaagtcctttatgctaaatcacagcctaggcttttaattttaagtttaaagtatgtttcagcaagctagaccacaggaacatgagggtaaagagaaaaaataaattgactctagagaattccataaaacttgccaaggcagccgtaaatatattcatggtgaggtctgttttgtgtacaatttatatgcaattggctggctcgatcgggaggatttatgctgctgcgttgcttcctctttgcaagtaggcagggtggcagacaggcaaactcacagatcatagagccgcattgaggtttcaatcccatttcttgaatcatagtccttaaggggagaggttctgctcttctttttaacctctcttccatgaaagggcagctgtgagcaaagcagagattagccactggtggttatgtgttgagcctaaatcatatccacgagatgagaccaagtatgagagtccccggtaacttcaaagcgcccccaacagactcaggactctgacaggatcgccttcatctcttctgtaatttcaggctccccaccaccccatgttcacccagcaaggctacccgcccttcccgtaccaccctcccctagagatacacaaaggcaagagttagcatctgagcatgctgccttcacaacacttggacctaaggtgccattcttcatagaacactcgcccttccagtctccttttatctccagagtcttcccagtaaagatctatttctcactacttccaaccatgcttcttaagttccaacttaaaagcattctggacctatagaactgagtgctcactgtgcaaaaggtatcatcagtgacattaggctgtaaaaagatgtataagtggcaggctcctgcacactcccaaaccaatcttattaatttggaaatgtgtgcttcacttatagcctgactgctgtgtaatcttcaaatatgaatgccagccacagggctcatcccactgagagcctttccagcgcgagccacctgctactgtctggtcccagccatacacctccattctaaatttgaccttctcagggaaagtcattatagcctacgtgactccatgttgatagctgaatgttttttatcatgagtgagagtttattcaatcagctcattctgagtggaggtcaccagcagccctttcagggctgcctgagagcgctttgttgtctggattatgtcatagatgggtagcatcataataagattcctggtacctgattgagcatcgagatgaatctgggttatatcctctttattttcagtgttgacacactggcaggttgccagggtttatgtacccaacagtgaatagtgttgtgtcagctctgccccatccagacaggcatatgttttcagtgacaggttccatcaaattcaaatgtcaatctggaggaattatgactgagtgaaattatcctaagccctcagcttttaaaatctattttccacatgaaataaatattgaacatccatattagggttgtctaaaggaaatgatctggcagagtgaatagctatatctatgcttatctctatctatagatggatggatagatagatagacagacagacagatgacagatagatattaaagagggattaattaggttgcattacaggattcagtccatgtattctaactatgagtgtcttgcaagggagaggctaagcatatagtagtttcctccctgcaatcccagtttggcactggaggcctagagtccttccaagctgctggtcttcagtctactgttggaagcctgaagaaggaggctctgatattggtgaaggagtaccacagtaacaggatagaagactttgtgagcaaaagtgagagcaggcagacaaaattcaaagtttccttctcccatgtcctttgatccaggctactgcccacatttagggtgggtctcctccctgtttcaaaggatctgattaagaaactacctcacagcagtggtccagtggcttgtagttgtttagttaatttcaaatgcagtcaagctgacaaccaagattagtcatcacaccgtcctcctcaactgtgtgtacatattcattctagaaactgtcaaatacaatcattaaacattatccaaagcatactaactcttacacatacacacacacattcattcacagcaatttgtgtacattttattatatgcacaccataagtacacgtacccttgcctgcacatttttgtgcacatatacacaaaagcacacagtcaaatttgtggtctcacgtacatacacttacacacaaacacatacacactccatttcaatgccaagaggaagagtggtctcaaatagttgttagtttcttttaatattgatttcccatgtgcattatttagtaagaagtcaaataagtgattaagaaaaaaagtcaagactatagaagaattgggtttattctattgtgggatgtttatgcttcaataacaacaataacaataaaggtgaaagggtgtgatacggaaccactttcaactgaaaagttcctgagccagttcatcctttcagatgctaacacttaacccagttatacacagtttcccctcaagaaagctgggagtggggagaagtcactacagctttgttgttcttcagtgctgggggagcccaggggccatctgcacgacaggcaagctgctaccactaaaccacccagacccctgcatagaaaatttctttcaacctggtacctggctcttaaacattggtaaggttgtcatctcctaaaatgtaacactcacagtccttgtggttttgattgacattggggctgtcaaagagtcgttccgggatgaggctggcctgcctctcgggcagtggttctccaaacatgtctctatggccacacaattcacatgtgggtgaaaaacaggctagaaacccctactgtcagactccacccaagactgactgaatcaaaagttgtgagaggggacccagaaatctgtctttcaactcaggtaaaaccttaaagagttgttcttgagtaagaaaacttaaatcttccttgtgtgcatctatgaaaccagttccctgaaacctgtgcttacttaggcaaaaaatgtctctgcagggagttcaggtcctggggctgttgccttccaaaagttgacagagtaaagaataggtctaattactcttttgtgatgcaaacccagtggatttggagtccaaatggagaggcatcctattggtccccctcaaaggaggagccagtaccactgctccctccactggagaaaaagatgttgcttgctagctattatcaatatattctgtttccgtgtctaagacatcaatatgttgtcctccatggcaagctttctcttctgccttctgaagcagacctatcttaggttccttccttgaatctaaacttttttgtcatgctcagttctcctagataaaggagagtgggttactaatcagcatgaacaaatatttctctgtctgtcacctgctttctcatcccccacaccatgtcacatgaccagacatgtatttccataagatgcaactctgcacctgtgtgtcagctccccagccttcacgcactcagtcagaactcacactcagatcccatgctttaaaagtacaacctgcgcaccttcccccttacctgcaaagctgtccacagtggaaggaggcctgtggccttgatagcattgctttacaaagggagaaatcatgatacctggaggtatctgctgtcacactgagaaaggaccctccctctcctccaggtcacacagctccactgtctctctgctagtggcgactatatctgcagagccaggataaagcctccatcttctttatcagcatcctggtttttgaggatgctggttctgtgctgtgcagaaggacctgccaaggaagtgatgttaacactcacagtagggccagcatggcttgagagcatccatcttctcaggggacagttgcgtccgacattctcttcataccctgtgtgctaggaaggctctggaattctcacgtttagaacacagctttactgatcagcttcctttcatttaaggtttccatcccttctcagtcacagagggaaagctccatctcagccttttaggtgaggaggattgtcgctgtttgaagtgggttgcaatttaattctgtgttgttgctgttagcttcagttcttagcaaacacaagggagtaggccatgattaagcaaattgtatgtttactaggtaattccctccctagcctctaactgatcttacacacacacacacacacacacacacacacatggttaaagaaaagacagaaaacacacagctttataatctttttccatattagaacctgcccatgagcttcaaacttgtctcctattgccagcaagggcctgtctaccaaggcagagggtggtgaggaaattgtaggcaccagaagctgtcccttgggggaggtgacagagggtcatgtctttcccctcctccttacattatgcctttcaacaagatggcagcaggaagcatgaggcttgcctgagctaagcctaggattggaattgttttagttccaagatgaaacctagagagtagagaaacccttaaacaaatggtagtgtgcctttctctttttgccatgttcctcccccttgcagccctggcattggtgctgtgcagagctgtgtgaccagtcagtcacgctttagtagatggaacgtgtgcacttctgaatgtgaggctctccttcgagacactagtggaagaagacctggggtagccatggttgcttcctgaaccttctcactcttccttattgttgaaactccaagacctgtcaaggaataaggatctgggaccaagacattatgcacggtctttgttccagctccttactcttcacttcctctctttctatgtggagttgggcatgagaacacagagttcgctcagtggtctattgagagtgtgtcaggtttcagtgggaattaaagttatccataatccaaagctgtcgatgagatgattccaggttcttggcctcagggctccctctgacgtcctttctcctgggatggtcctctggttcttttcttcttccccagactatggctgagagctttgggcctttctaggaaaggctccccactcctgctggatcctagcttcccaacaggctctgagatagatgcctagcctctgccaccaggctagagaggcctacatgatgaactgatggggctttatgctgagttacctgcccttagtccctgggcagcctcgagaagccagactagtttctccctcctaccgatctcctaccaccagttcctgtgcagctgccatttattcgtgtgttactagcaggagtgaggttgtctcctgggagctgcccaggtgataaagcctgggagcaagtctgtatactgtcctcctaagatggcttcataaagcaaatggactaaagatgtacctgcaaggaagattcctacctaagaattactatgatagtcggtgctgacacttttatttcagataaataagttatttataatagaatctgtgtgtctaggtcaataggccagaagcaacgagatattgagattcttggggccaggaagaaccccagcagtgagatactagagacagcagagcaagtgttctgtagcaagctgaagttttccatttgatatagagggttccagaagaaaacactgctttcccattgtcctgcctgttgttttccaagtcaatcagtggttctccggtgacagccagggctgcaacaccagacacagcacttcttaagtcttgcttgatctgtagctgagctcttggtggtagcataagcattggtaggaaacaggccctttattgataggaaatgccccaaacccaaattgagcacatctgaaagcattctgactttaagaagtggtcattggtatctctctcaaaaattcctttagtgatattttgagtgcgtgtagtaaggtgtgtgtgtgtgtgtgtgtgtgtgtgtgtgtgtgtgttacattactagggcttaaacccagggcctttcacatctaagtaagcacttcgcgtctgagccacatcccaagctccacttcttccttttccttttgatacagcttcttactaagatgagaaagatggccttgccctcactctgtggcccaattagaccttgaatttgcaatccccctacctcagcccctcaagtaactgagtttacaaactcacatcactatatatgtcttatttctggcagtgagtctcatttctgcttattcagaaaatctccaatcattatcagtcagtatttattaaaaatcaggtaaaggggtaggagctgtaaggtctggttcctataaaaatctggggatatcatggaatcctaacagtaatgtgtcttaaacaagaactgtacaatgataacagcagtgtagactgggaaatctcacaaggctccccagaaagagctataggcaattaatgcctatttagggagatccagttgaatccaaggatccaagctacctggtaggctatcccatcccaaatggtcaaccctaaactcatacacatatgagcaactctacatgagcacagcaggctgtattacatggacatgtgtgtgttgtgtccaggacagccatggctatacagagaaaccctgtctcgaaaaacaaaacaaaacaaaacaaaacaaaaccccaaaaaaccaagctaacaaacaaacaaacaaacaaaaaaaccaagcaaacaaacaaaaaaaaaaaccaaaaaacaaaaaccaaaaaacccaaaaacccaaaaaccaaaaaaccaaaaaaaccaaaaccaaaaccaaaaccaaaaaccaataatcttaaagaagaggtcatgaagttaagggggtaacagggagagtggggtggggagaaaatgggacagaaatgatgtaaatacagccttcacacataagattatcaaaagtaataaaaaataaagggatttttaaaaacaaaaaaaattaacagcactatgaagaaaaaaaaaagatgaaccacctttgagaacattgatgcacttaagtggaatattgagccatacactatgtcataaggctcatcagtttccactaaaagtctgtatgcaaaaaaaaaaaaaaaaaaaggtggggagagtgatcttgggagaacagcatagaatacagggactagggcctcctggactcctagataagctaagtgaaggaagagtcaatgagaaccctcagaggtcctaaggctcctctgtcccatggttgatgttgcatgtttatttgattactagttgtgtaaatccttatcatggtgatatggagcaagggctcacagcccaaagtatgtagaagcaaatactgtgggacctggcttttgcaaagagaaaagattttgttgtgtgctcaggacacaaggagttcaaggactgccagcttaagtctgcctccctatccattggtaacaatgtatatagacaggagaggggaggtggcacttgattggctggtgagagcagtttttaggccttttgctcccccaaccccgacctctgcctcctctcattgtgtgtcccaagcttgttgtcacattccgcacatggcattttgagcttttcttgtcaaaaggcaagggttccttcggcatgtgtcactcatgaaaatccggttttaaggcatccttgcatggattctggaagactttttatagaaaacaacttaagaacttggttgtttggggcattgtagctgagtctgttcatccattaactaatttcaaaagaaaatattgtttccatttagagacagggaggctaccaagagccagagtctgtatgacttgaaggttcatggtctcttcagtcggcccagttaccacagtagtgactgtgaggcagtagcagctaatgccaccatgtgtgtactctgtagtccctggctccatacctcagaaccctacggctcttgttaccagtttatacactggacaccaaagagcttcaatctcttgtccacagacgcgcatcagcgaatgatctagatcccaaccctgggagaccttctttgtctccgcagcctgtgctccaggcccctagctgtacatcccataaaccacagggaggaaactgacggtgaccaaccttgacactggagtgattctcctagggaaaaagccagcatcccaccacccactccgtcaggcccaaagatgtctgtcttagggtgtctgtctgccttagagtgttttgacaccagctcatccatttaaaataagtttcctgaacacaatgagctaagggttggggtgacttctaaataggctactgtcagagttccagtccttcctgacagactggcccctgagatgtgtctgcctcaccctcggctgcttggcctgctctcttgctagtctcctaattggtgtgagggactctgttccccagctgccagccattagcagggtttcgcagggaagggctttttctccccactgtgttttgcagtccctggctaggcttgcctggtgacagctgcttgctgatgccgggctttatggaatcttctaggccccctccactccccgaagccctcctttattgagtacatctcattagcaggctccattttctggtctctcacatgctccctcacacttagcttcattgtgcctctgcttgtcaccttcgccagcctggcttttaataatgtaaatctcccctctgatggcatggctgctcgttacttgctgtctggcgccacacaaacttacctaatggcgcctctgaaaagctgaggctttagtggagaaactggcccgctccttccccacatcctcaagggtactgcagctctgtatttgtcccagaaaagaggatcaggtcaaggccacagccaggctttgggcaagacgctggagtcccaggaccagaaatcccagtgcggagctaaggagcatggtagttacaaggacagtggtaattctttggcagagcagctgtggggaaggcacatgggaaggagataagagccttcgacaaacatcgaggtctgtacaacttgtcaagaagtcatagcaagggtgccggtactaaactgctcttgtcaacacagactgtcctcaggaagcctgagtgagtacatctcagcctctaccctccaaatgtctcacaccaaatatggactctgtggaccaagccccatactctcaggacacttcctgaaggatgacactagattcaatccaacaggttatgtaacccacagctgaacggtgcttccagtctccgaggtctctttaggtgtgattctgcaatcctgtaatggccattaggctttgatggagcaatgccgttgtgagatattgtttaaaaggtctaactgtaggaagtgcagttgtctcacttctcccctgcatttcttagcgttggagttactagaagcctacaagccttacaccgaccaacaggcgcctcctggtcctctaccattctccttgaacccttcagtctcatgaaaccataggggtttgccttcaggaaaagccatttcagggctggaaagagggctggctgtaaaagcatggggacctgatttcagatccataatacccgtaaaaggctgggcatggccacgtgtgcctgtaacctaggtgccgtgggagaggagagagagagagagagaggaatcactggagctttgtggctgccagtcaagctgggttcaccgagagaccttgtctcaagagaataaggcagaaagtgactgagaagggcaatcccgcctgtgtgctctgtggccatggctgtacacacacatgcacatgcacacatgcaaacacacaaaatgcagacgcatgcatgcatacacataaacacacactcatgcacacacactgagaaaaagacacagacagacagaaatgcatacaggcagacaggaagactcggagagagacagaggaaagacagacactgagtcaagcagacacaaagagagacagaggaaagacagatatatatagagagagacagaggtgagacagatagatatggagaacaaaaaaaaaggaacaaacttcatgtcacttttagaaatgttatcagggaaatatataaattatcatcttgtgtaaaacctgattttaatttactttaatgttattgtcagtcatctataaagctaaggagacatctcagatacataagaggggggaaaaagtcgtgtttgtggagtgcagtaccccatgacaggctagcaatataatcttccattatgatacttaaagagaagggagccctttaaataatggctggggaattgcacccttaatcccttgcagtgaggttttagaaatgggcacttcatcaaagtcttccaccacgtatttgtcagcatgtcagagcatggacagccgtggagtgtggccgtttccctgatgcagcagcagatgctgtgtgtgcgagaggcacacactgggaagtgtacactctttaggtctcccttctctccagtatcatctagaatgggcaaagcactgtgatcagagagagtgagcccacccatcccattgcctgaccaggacagagaagaaagggataaaggataagaaatacctcacttaggtgctgagatcaaacctcatatggatgacttactgttataatatatacatatatatatatatatatatatatatatatatagttttaacaggaggtaggaggaaaatcatctttatttcaactctttgtgcttaattttgctttataatatctttgtgtggtggtggtgagaggggtatgtacaaccacacagaggccagaagttgactcaggctaggctggctggccagtgagctctggagttctccagatctgccactccctcttccccacccccacgttaacactggagttacaggagcataccaacatggctgactttttaacatggggctgggatttgaactcaggtcttcatatttgcacaacatccgctcttattcactgagccattgccgcatccttatctggtgttaatctgacgtgcacagtctactttctagcagtagatcccaaggaaaggaacctgttgattcccccaatccctgaatttgtaccttccttcccgaagataatacacctgtccctcagtatctctgggtaaccaagcctgggatccctgcatatactacagtgcacggatgctcaagtcgtatatgtaaaatggcatgatatttgcatataacctatgcaatcggcctggacattttaagttctctgtatatcagttataatatacggcagtctgtacctgtgtacctactgtgtagatgtttgctgtgtagatgtgatactgtaccatttgggagtgaatgagaaggaaagaagtctagatgctcagggcatgtgtttccttcctggtcttccaagtctgtggttagttggatgcaggtggacaccacaggagcggggagctgactgaactattttgttctgtgcaccgcttaataagcagtcttcatgcctttgttctccacatctgtctatcaagggaggtggcacagagacctaccttacggatgtggatgccaaggcccacacacgattatcaaccacagactggtggtgatacgtcatgggtgagagctccgtcccactccaggtttgctccatgtccatcaaagcccacacctgtgaggtagcaatggtgaccatctaagtttttctcttcatggttggatctatctaaattaggagagagccaggaaaggcctccagatttacctctagggcagcatggccctgtttttcaccatccaccttctaggcaggagttacccgccccccctcatctgagccttcaacctacatgcgaggcttagggtgctgtgatcagtatcctgtcacctgcctccatgatgaattctggcccccacccctgccacttgccccactgtggagaaaactagatccttggttggaattacctactgccaagcattgctgtttggttgtgttgcctaaattaatgacttcttagtgcctgtgctcgcgcgcgctcgcgctcgcgtgtgtgtgtgtgtgtgtgtgtgtgtgtgtgtgtgtgtgtgcatgcatgtgcccatgtgtaatgtacatgtgtgtgtgtgcatgggtattgtgggcctcacttatgttaggcaagcattcgactacccagttaaccaacagctaccttggcttttagatcctcgtctggcaattctctcctcttttcccatcattcttcctgtggtgacttttgaacaacctatctttctgagaccttactacacagccttagcacataggctatgttggcctcagattttcagcatcctcctgcctcttcctccagtagtagaactgccagtgtgcaccaccatgtctcgctattcaacctgcctctggttttcctttggggcaagtttctgtacatgggctatatgcatcatgactcaggttcccacaaacgtgaagtcttaaagaagaccctgaatgtggccaaaaggaatactgaatggcagtttgggacagttgctgcatctacaccttgactagtttctactgagctgattcttaaaagtccatgttaagggaattagaatacagtggaggtgtaaaagattggaaagatgcagtgattggctgatctaatgctatcccccaggaccctgagtaggaaaaccatctttgattacatccaagtggccaagcggtcccttgtcttgctcttatccatggatggctttcaccgtggatgtccatgtacgaaacttcagtaagatcgaaggcagagttctttgccccttatcaccttgtgtagtctttctgattggtaagacaccctttgaactgtgaacctgctcaaagcccccctgagtgtcattgctgaacccaggcctccaggccaagagctactggggagaggaaccgacaatagagtctcactaggtctgcaccatgatgaatagcgaccaacaattgtgtctgctggcatgaccatgtgtgtaacagtgatggcgaggaactgcagagcctgctcctcattagccttcaataagctgggtggcagccggctatcaccttctcattcatgaagggggtgtgcaacttgagagagttatgttaggcccctctgaatgagtgtctcacaacccctttctttcccgtctcaggatgcggtccacctggagatgctgaaaagattaatgagcaagacataaagacaacagctgccctaagcaacagctgtctcacaccaaccatgagtaattagacaaatgaggcaaagtggatcccaaccagaggggactttggttcacgctgacagtctcccccctctctgggtgtccacccctcctttcctacactcagactgtccctttagctgtctggatgccattgtcccaggtctgttcttggaagtgactgtggtcttgaccctgagggccgagctaggctgtgagtgtggatggcagccctccctcctctcctggaggaacagagcagagggcagggtggaagatgttgccaagaatccaacagtttttgtaacagaagcaagagctcctggcaagaagtccgaggaactttcttgatcataagtggtgtctcttaagctctttaattacagaggattaagcaggaagtggagtgcaggactaaaggaataatggcaaaaggaggcgaagcagaaaaacccaatttcctttctggaaggggggaaatcctccatttatttaagtgacttgcacagagaagagcgatatgtagtgttttcccctagctctaagttcaatggtttggtttttttagaactgtgtatctccttagcaggacataaggcagggtcttcagctcatctgcagaaaagggaccgagtgcttcattaagatgcaggcatatgcttccccttcaaatggctggctgatcccgtgcccgccttccttcttctgcgtgtgagcttctgcctagcctagctcacattttcattcagcaactctagttacctagaaatggctgcaaaattgcaaaacggaaaggcagcgggtcgtgtggctccatcagttctgcctgcagtggcagcacccttgacttgcatggggagaggcactcacagagagcctgggggcccaggtacccctcagaagtcgctgtgtggatggatacctgcttgtagcatactgctgtgtaactgggacaaacctagacatgaatagagttaaaatcaggctgtagagagtaatgaggaacaaggacatgccccagtggcagatatacgatcatagtggcgattgtcctgtatgcagtggatgtgcaactccaaagtgcagtcctggtaagatcctagtcatagcttctacatactaactcgccctacctatagaatctgtcctggggtcctctttgtgcgacatggtatccagaatctgggtcaaggcattctgtagctttatcatcagcatcatcattagaaaagaataatctgtcaaggtccagaggaagacaggtgaagggagcagaaattgagtcctctgtgtactgtgttctatcttcagcagctcacccagcaactcgtacaagtctcataacagtttggtaggcaggcattgttaccatacagatggggagagcgaggctccaagaagcttgaccatggggggtagaagctggagggagaaaacatggagccttaaagataaatttagcccagccctatcgtccacagacttagcagcaaggtccaaagtgtatgtcctagttagtgctaactgtcaaattgactcagcctagaatcacccaaatagaaccttgattgagtaccttcgtagggtttgtctgcaaaggattgtcttattattaattgatgcagaaggtctgagtccaccgtgggtggcaccatcctccagcaagttgtccttggttttataagaaagctagctaagcatgagccaacaagtgattcagaaagtgagtaagcaaacagtggtcctccaaggttcttgcttcattttccccgccttgactccctgcagtgataaactgtgaccagaagttgtaagccaaataaatcctcttctcacctaggttgcttttaggcagaatgtcttattacagcaacagaatgacaccataacacaccagtgtgtgatatccatttcttcctgtaaaatcttgacaagagtgtccatgccctgggtcatcaggggaatgaaataagatcacacagatgatggcacaggcctggcataacatagccagcccctcacctccaaatggcaggaactcttctatggtctcgcataggagaatcacattttgaaacctgaaaggccaaccacaccctaccaccataacagctggcccccaatccacaccggagtatggattataaggagataaataggcagggtatggtattagacatctgatgagcctggtacccttggagtttttcatgattaagctttgtacaatgaagtttagtccccaagcctcggcaaacaggggtggacaggaggatgaccttaacccactgtacatgatacgtattgttctgtgaacatttctatgtgtttgaaatgttttgttaaaacaagtaccaccaggggcttgggggatgattggaatagcaaaaaacttgccatggaagcttgaggaccagagtttcagtccccagcacccaggtaaatttcaagtgggcgtggaagtccacctataatcccagcatatgggaggcagaagtagaagatcctggagtaagtagactagctataccagcctaattgtcaagctctgggttcaaatagaccctccatcaatatttatattatatatgttatattatatatcatagatattatatgtatattatattttatataatatattatatattatatatatatatggaaagtagtcaaggaagagactcagcatcaacctttgaccatgcacacacacacatgtgcaaccacatacacttgtactcacatgtatgggaacccatgtgcacataacaaaattatgactatgccttgccccaagcctgatgggagtttcatcagtactaacagctcgtcagacaaagaggacaggaggtgagaaatcaccctcgggcattcacaacttgccacgttctatcactaaaattttctccctctgcagctctctagcctgccctacgcactatgtgcccttcatgcctagcatagtgctgggcacatagtaagaactcaacaaaagggacagtcacataccggactaaataaacagcatagttaaaaaaaaaatagctgagtcaacaaaacaaaacaaccaaaaaccaaccaaccaaccaaacaaacaaacccagagctgagtccctctcccagagctgagtccctctcccagagctaagcctccgggtctgtgctgctccagcttgatttctgcataccttaagactacaaagcagatggtccatttctgtcctcagtcatggggcggagcagggctggtctcaagcactagagatgcttatgttccctgactccgaaggtggattagagcatatgcccccctgattccaaccaagacacgctttcatccccacaaatgaggcttctccacgctcacgtaatgggatcccaaataacatgatgcaaaccaatcctttatcacacttgccccttggaacgcatttcaaatactggccattaaaaacaggccatttcacagagctttaatgatgacactaataactgtggatttttgtctcccagagccccgatgagccgagctggggagtaaattatgaagctaacttttatgtgcatggtttattgatctttgagcttcaagggaactgcaccagcccctatagcctgacagtccagattagcttttcatctatgtaattgggccaccagggcacagttaatttttaatttatattaataggaagacaaagaacacagtgcgccttctctgcattcaagtaatggacatatcaaaacattctacctggtaattataaataaaccattcttcccatgacccagtgagggttggcttacaggttcgttgtgtatttcaccataatgtatcatgaggaagttccccactgccatgaatatttataccatcacatgcagaaggctactcccatcgttaagtagcccgctctttaatccgtgtttggttttaacaggtgaaagtcatgctgcgtatctgttccacatcagctcgagatacctcagaatccagctctttcctgaaggtggacccacggaagaagcagatcaccttgtatgatcccctgacttgcggaggtcaaaatgccttccagaaaagaagcagccaggttcctccgaagatgtttgccttcgatgctgttttcccacaagatgcttctcaggtgggttagagttccctcggggctcacctaccattgattaagggggtgtgagcctgtagggtttcttctgggacactctaacgaacgagttcctccatccatattattatgtttggaagtcattctgagctccacggaataccccagctcttccaagttactggtatggtagtttccctggaaagttctagtgtggtgggatttcagcaagttatatacttggagggctgaggaggtggctcagttggtgaagtgcttgccacacaaacctgaagatctgagttcatatcctcagccatcatacaagttatgcatggtggtgcacgcttgtaataggctccttggagctcattggctggctagtcttgtctgatggatgcgctccaggatcggtgagcaatcctggaaagagacagagagagacagagaagacagagacagatagatacagatacagacagacagacagacagacagacagagaatgaatgaatgaacccaacatcaatctctagcctccacacttattcagtcatgtgtgaatacccctacacatacagagatatgtatacacacacacacacacacacacacacacaccacatgcttggggagaaatgaaaacaaggcagttattgataagaaactaactggaaaggttggaggttttggggtgactgtaaaaacgtgctgacaactgacctgttaggattctcctcctgactgggctttgggaggccatgtaacagggaaaatatttcaggtaactggattaaagtctcatagccatggggagtgggaggcaggattatagccccagtgaggaaatgatgtgctcagtagggaaagagaggttgaaacacacctgtggccagaaccagtggagaaacgaggaacggaagagtgtgtggtatcagtcagcactcgctgcatgacaagtaaggcctctgacctctcctccataccaaaaataagtgaatatattcatctatggtgaattaagcataccacagacagccagtggcctgctttgcctgcattgtggcatcagggaccctgtgtctttctgataaactttaaggacttcccaagctttatgtaaaacccttcttagtatgtcagttaaggctacagctgaccagaggaccagaggaccagagcaccaacagttagcatctgcagcctgttcgttttctctatgttgtatattgtaggggctattggggttggcatgacgtgtgtcttccaccaacaggccctagcacatgtaggcaccattcgtctggaagctcaacatcactgtcccgaggtttatcctaggaagatgaggccctttgtggttaagattttgcagtttctcttcatttcaatttttatgtcgtaccacccaatgagtttgataatctaaacctgacaccagggctaataaatggcctacagataatttaattaacgggttaaaacttttccaaagctatctgggaagttgaaaggattctaaagcatgccctaaattaagcctggactattaatgagttttagatttattcccgaaaaaaaaaaaagccatttttattgccagtcttttttacacttctcacttggttcccaggctgaagatgctcaaagctgcatggtcacagacctcagaacattctgatttgctccgtgtcttgtggtataaatctctatgtatatctgtggttttcaagaaccttcacctacgtcaagccatggactcccctttgaaatcttttgggtagaaagagacattttaaattcttttcataccccagacaaggacactatgactccacaaataatccttgttaccttagttcctgtcctaagcagatatcttcccccgagcccaccacttcccccttaactgcagtgcatcctgcttcgtacaccatgtctttgacacagcagtatttggtcaactatttcctaaaagtgtgtcattgcgtaagtcatataactctctgggtctccatgtccttatgtggcaaattcatgtgcctcattagactattatgacagcaagtgttcaacagaccttgtctgtctgaagtgtcatgatttttaatatgataccactggtgtagccagcttaaccccacagagtcagcaccccttaagccacaaggcacaaaacaggcaaatgtgcagtgtggctttgactgggtcacctgttcttgtatctgtattgtcctacgatgttggacaggctagcctgggtttgtggacatggcagtgtccagggcatagatatgctggctcagaactgagctgacactatcatttctgctatattctactggcccagattcaagggacactctcaggcccttacctgtgtggcagctgtcactatggtggccccaggaatctgtgaattctttcttcctgcttctaagaacatcatctccctggcactgagtaacaataagaatggccctattccttctttcccttaagagctatccctgttaccctgaagtagccttggcagctttgaccacccactgttgggagaaacgtttgctagatcttgcttaggtgtagatggagaggactgagacctgtggctgagcaaaaccttgggcagagctgtccctgctgtggtcagggaggcttcctgctgcgctgggcccatggggaaggacagcagggagtgtccaggggtcactgtcagcccttagcaaaccacactaggcaaatctccagtcattctcttctccctgaagagcagaagccctacaggggagtgtgtggtgatcctcataccctgtgaggccactcctgtgtcttcactgccccttggtctctttactggtgacaccaatggcagtttgttctgcttataaccaaaattctccttggtgtcttaagactctcttaattaacatcatgtgtggctagggtggctggcagtctcccgacccccacctcatttcaagttgaaggtgggcttgtgggcagtaacttctccctgcactggatgagacagttcaggctaactccagacaacctctactgttctagtctcagcttcagagcaacattggctcttgtcaccttagacctggaagttgtataagatctcatggtcctcacatagtcctatccctccatcccttggctaaaggggacccctgaagagctgctgaggtgactgcccatgaacaattgactattgttgggagtgtggtctttcaatttcagcttggaagagggaaatcgacttccaaatacttagatccattgcacagctgcaccacggagctgaacgactacattcatggcccaggctgcctcctttcagattcccactgggaggcacactgctccaatggctgcagagccctagcatttgatggctctcagggcctctatgagctctgaccccagccctgagacagaagtgaaggcgaagcaaaaggtcatggaaagtacttctgtcctcctgttgctgcagtggcctgagatgctaactagagagtttctggatctctgaggtggtccacacacttgactgcatagctttagtttgcagcttgcactgtcactgagcatcaatggagagatacaaagaagtcatcgagaacctgctctcggtgtaaagattgtgataatcacaccgaagacaagaaggcatgcttagctaaagaataccctaaatgacacactgacatgtggccaactgatgctgtttgcagtgagtgtgtgtatagagaaagagggtttcaaaagtcagatgtgagcaaagaaagaagggatgggaagaaagaagaggcacatctagacattcttgattctgttagtactaagatcgtcctcagggtttctgttctaaattggaaatcatgttttcctctctagtatgactagcttgtttgagagatggtgtgtttgtgtgtgtatgtgtgtgtgtgtgtgtgtgtgtgtgtgtgtaaggttctggtggacagagagacaatagagagtcaagttccttgctgaggaggctgacagaggggacaagggtccagaacccatcccattctctcactgcagcctgtacctactttaagactggagagtgctaaaggaaggtttgtattcagtgtgtttcactgataacatgggtagaaagtccccagtgtttttaagtggcagaggctggaccatctgggactgtggtgatgctaggactccaagccccaggaaggcagagtcacttctatgtcattgaggtgccttaggtgctgcgcggtgcatttatcgagtgccttgtcttgtgtcttccaggctgaagtttgtgctggaactgtggccgaagtcatccagtctgtggtgaacggggcagatggctgtgtgttctgttttggccatgccaagctaggtgagtggaaacttgacttctgtcttgtgctgatcactaggtaacctcattcctgtctcgatattggttctagattcctcgatgcgagggcaggctaagttcccttttggtaccaaactgagtgataaagaacaaccatgcctgactttgaaacaatgtcagtcctaagtggacagacctattcccataagacagcttcaactccaagaggggaataacaggataacgaggtcataggtcaaggtcatagtcaagcccagggagtagagaagcagggaaggtgttcatgtctgtcttgatcatgggatggatgtctgggaagcagattcgggtgggtggagccaatggaggaatctccaagcagagtcccacatgggggaagcaaaccaaagctgtccttgggccaacatccagccctgtgaggagtgctccctgtgaaaagtcctccccgtttcagcacttgagaaagaagccaccaactagcgctgcaaaacattggcttaaatcccctgctacattctctttccagtcctgatctctctgcctcccaggccttgtcagatgtacagaaagagttagcaatttcggaagcttcttggtagaagaaatcatcccagagccttgtagaggacacagagacctctcccctgtgacagagagcccattccaccccacccccactcctttcttcacttcttgatcacagatcaaagcaggggtcccgattttaatggaatttgctcatgctattaaaaacaaaacaaaacaaaaccaaagcaaaccagcatttaacttgagaaaggatataaagcacgcatgtgtggatttaatctgtggggtagctataaaaaggactgtaatcgtgatgaaaagccccagcttcctacttcatgtagaacaagcccaaaggcagatagcctgtttgaggtcctctgcaaggccccttgtgacttcaccctgtcatttgtttgggctctcacattcttttatagctgcttcacctccagtataaggaaatgtttgctacttttccggtcttttcattctttagcttgccctcgtcccactccccacaccttcctcctgtatcctcagcatctgctttttgaagctctaatgagtgatgtctgtgtgtctctcttcccctgctcccacagggaaatcctacaccatgatcggaagggacgactctatgcagaacctgggcattattccatgtgctatttcttggctgttcaagcttatcaatgagcgcaaagagaagacgggggcccgattctcagtccgcatctcagccgttgaggtgtggggaaaagaggagaaccttcgagacctgttgtctgaggtggccacgggcagcctacaggacgggcagtccccaggcgtgtacctctgtgaagaccccatctgtggcacacaggtgactggctgctttggaagtttgacttagctgggggtgactcctctctacttcagaggatggggcatctcagacctggaatcatttaccatgtaaactgggaaatgcttatgagtgtttactttaaagtggacgggaactttatggcctgcagctgtggggccatctgctcacccaacctaaatatttgtaccttgaatctaattgacaatgagcaggaactgcaattgtcatagcattttgggggagattgaatccactttcttgatgcctctttcaagaatgaaaaaaaaaaagtacagtctttcttttgtttaacaacaaactgaaatatttactgctgtgcacaaatagctgcagccattacaggggctgtttatggctctataaactgtgtttctggcactgctttacagccggattagcagtgctgtgggaaaaactagtaaccgatttctaattagaaccgtgatagaattgctagaactatggaagctgagagaagttcttatttgccttttcaggaagtcaggccttttaagggggcagggagtcttccctttgctgtttaacatagggatctctctgtggctctcccggttcatatccggaaagtccgttctgccagtttcctgcagtatgcttcccaaaacgccccatcttagataggagtctctgataaatacctggctcctaccagctaggtcatttctgtgaatgaggatgccccagaaacaatattatacccaactctcaaagcctgaccctgcttagcctctgatcagggaacctggacccttccagtgtcctttagaaatctctgtagtgtgcatcagcgttgtctggaggtcttgttgaaattgagcactgggcttctccctaagagtttctgactccacttgaggtaaagctcactgccctgcaatgtgcattcctaacaagttcccataggatccagggggctgtcactctgagggaagcatagcatctgcttagatgtaggtgcacagactccatgacggaagcagtaggtgcatagactccatgacggaagcagaagcacccgggccactggtccttctgcaaacttggcagggctcaaacatgtgtgaacttgggttcattttggagcctactaccaaaggttctcttaagtaaagatctgtttcccaacggtaaataaggcaaagaaagtaatggcctcttgaaactcttctttaaaatatgtataattctgcagtttaagtctgatagtaagttcaaaaggacacatccgataaaactcccttcaaagttccaggattttaaagctggtgttagtttgcaaatcctgcctgcaccaaatattgcttctcacagtttgaaattataggtatggttaaagtcggagtagaaaattgtcataatttgtaccaacccaaagacatgttgcaaatcagttctttgaaaaatcaaagctaaatcaggctcgcacctgctgtgccagccttcagatcacagaggagaggcgatgcagagtgtgaggagacgcaaggacttgtctcaacaaaaccaaaactagatttccttttccaccacaaaagggaccactgggactcagaccccattctcacaagattcagacacaatgcccactgcgtcttttctaactgtgtgtgagtttgccctgaacataaattcaggaactaaatcaaaaacagatctctctctctctctctcaaatacagatgagacctccaagtacttaaatgtttctacatgacttttgtacattgttctgttgctaggataaaataccccaacataagcaacttgacagtctttattaggacttgaagttgaaggggatagatcattgccaaggcagcaggagcctgtagcatctgatcacgtgacattcacaaccaggaagcaagagtgagggaatgcctgctgctgctgagctctgtctgtccacttgcacagcccaggagcccagccaggggacagtgccaccctctgtgggtgggtcttcccacctcaaccatgcagtcacaataacccaacggtcagatccggaggcctagctcccaagtgattcgaggttctgtcaagttgacagctatcactagacaccatatatgtacttgttgttcacaacaattatgtgactaaatgtggccccaaaccagcttttattaaataaccaagaaattgaaaatgaacactaggcaagttccttccttctccggtgtaaatcacatttcacctgtctccaatacaatctctaaggtcaaaatccagtcacatctctcatgttagaggatggacggtccaggatgttggtttttgagatgagcatgtgctaccaccaacaccctgacacagccctttgctagctgtaaaatatttaaaaccaagttacgtccaataaatgtggacaatcttacttttaaaaaacaaattaactaagctgggttgccttagccattaaagtcctagccacaaaggcatgaggattagagttcagagttccagaacacacataaatgttgggtgggtatgaaggccagactataattctagccttgaaagcagaagttctcaaccttcctaatgctgtgaccttttgatagagttccttgtgttatgaacccaaacataaagttatttcactgctactccataattgtaatttcactactgttatgaatcataagataaatatctgttttctgatggtcttaggtaaaccctccagaaagggtcatttgacaccctcccaggggtcacaacccataggttgagactcactgccctaaagagagccaggatcaacacagcaggcttgctaagaaactcttatatctggaattctgggatcaagtgagagaccctcccataacaaacaatcaaggataattcccagtgttaaccccaggcctctacaggcacacccacacacatgcaaacaagcctacccacatatgcatcctatgcatacatgaaaaatgtatgaaaaaaaatgactaagctgagactggcccatgcgtacaggcctggtttcagaaggacttctgccttccagagtggatggagcccacagcctcatctcttactttctgtcccccagctgcagaaccagagtgagctccgggcccccaccgcagagaaagctgccttcttcctggacgccgccattgcctcgaggcgaagcaaccaacaggattgtgacgaggatgaccaccgcaactcccatatgctcttcaccctgcacatctaccagtaccggatggagaagagcgggaagggtggaagtaagtccatcttagccagctccagcactagcgctggccagccagcacccctcacctaaggccgcagcagcatcctcccttagcagagggtgtggcacctacctgcagctcagtggtctggaattcaaaataattgtagattataggcccaagctcactcttgagttgaacagggacaaaagggtagctttggcaatgataacttataaatggcactgctctggatatgtaaaagaatgggtttaaaaaagaaaagcgcatgttgaacactttagctctgttcgcaagtcctgctgggatctctacctgtattgtcagggagttccagagtaacagagcttatagaatgactctctctatcgctttctacgtgtgtgtgtgttcccacttcaaagattcagattagaagtaaatctttccacttaaaattaagcagaactccctctcagatgtgctttctctgtgggggttttagttcattccagttgtagttaagttcacaaccaagaatagccatcaccccaccccaccaaaaccaagagtaagccactagaggactccccaacatgctattcatcactatgctgagtctgccctataggctaggaagtaataatcgtgtttctgaatagtttataaatcatactttgaaagaacagccagatgtgggctgttcctctctatgtttccgtataaatgctagcacagtgattgctctgtgacagagccacccaaccagaccccagctctgttcacagtcccagccttctacttttcccaaagctaggactgggctagtaaggcagggactctcacgaacatcttggcagggcttttgatgcccaagcaactagcccgcagttcttcttaaatgattgtggatgccaggaaagcaacaaaacctgagtagggagggaaaccctgccttgagaattattagaagaggccctattccaaggaaaatctgaaattaaaacatccacctatgagccatgaacggggggtggggggggtgggcacacatagtttcccctcaagtgtccttgttgcccagaagacttgcacaatgctcctgagatagttctctggggttcctggtatcctcaactggaaaattctctctcccacctcattgcctccattggtctgactcctcctgcacttcctactctctagagtttgtccacttgattccttgtttccacagttgtcttggttttctgaaccaatgtctcactatttagcctgggtatccttgaactggcaatcctcctgtctcaccctccagtgtgccaggcttgcagccatgtacccaccacacctaacttagctacagagtcttagatgcaggtttattgagggaaaatttgtatccagtggcctgcaaagttgtctttgctctttattctcagcccttagcccacctggaatctgtggcaagcactgatctgtttctctctgtgtttgacttaactcagagtagtatgcgactcaatcttgtggcccaatgggtccctttgtgcctgacttctttcatttaactcagtgcacttgagattcgtttctctggctaatatatcacttgttcacttaccttccttattctttgccatcttgttttgattggccctgagagctgcctcccatccccaccaggctaatgaatgaaaacagctatctagtagctgggggttccactagccaaggacacctgcacagaatgggaaagcagatggagcagttccccagaaatctagaaatcctgactgtcacttgtcactctgggagatccccctcctcacctacaccatcaccatgggtgccattattaagtaggaccagatctccctggacggcctgagatggtgagggtttgtctcaggaacagcaagatgtattggatgggaatcttttaaaggacacggattctcaaaggagagatcgtgccatgtcacgtactttcatttagcatcacaatcttgaggctggaaatgggactcaggaccagattaggagctcagacatctgcagctaagctgtgagttcctttcttcctgcagtcctgggagctggctgttaagtcccaccctcctgctttttctgggtaatgtcttagcaagtcgatgtgagaactggaacactgatatcttagtcatttaaacagctgtcaatagtagtctgcagtgagttctgacatggtcagcaaaaggaactcccaatatctctgcctcagacaagggcttccaaaggcaccaagcagagaggtccatacggcccaaagagtcgtacatcaagtggcaactctcttttggtgttttatttatttatttattccttcatcttatttgcatcttagaatctgaaagctgaagcaaacaatgaaaatgcagagagattccaccaaagtgcttcaaatgtaaaaatttgaatttctgactccaccacagcgtaaaagaacattctctaaaactgacgacttgctcccaagttggtcctaccaaatcctgagcacttatcaaatatttaacatctaactcatccttttatttctaagttgtgcatgaaaattgcttttaaataataaattcaggtgaaaggaaaaggcagatgccaccagtggcttccaaacctctcaggtgatgtccggtgttgcagtaaactagatgagagaaagggagggttcaggctgtggagggcaaagggcaaaccactcccacctgctagggccccagcatctcaaaggcaaagattcagacccagcctggagcccagcaggatttccgtggatttatgtggctaacccataatgagaagatttggcatgttgtttaaaatggaaattttgtttacttatatataagttataatccctgtggacttggcagccagaactcaattaagggaaggtttattaattagtcaccctgaggggaagcaggaagcagagctgttaaccaactgggagaggcttagcctgatgatggattcaggggcaatctctgctgcaagaactagatacattgtgtgtgtgtgtgtgtgtgtgtgtgtgtgtgtgtgtgtgtgtgtgtgtgcccaagtcttagacctatctatgcattgtatgtgtgcgcatgcacagagagagagagaaagggaaagagagagagagagagagagagagagagagagagagagagagagagagagagagagaggactaaaaccttctggtcaagatagaaaagaacattctttgttgacatgtcactgttttgtagatagtatcaggttgggcttacaatagctccccaatcccaacacatttgtaatattagcagagctagttctccccactcgtgagtccttactgttaaatctataagggcttgcaggctctgtgtaaattcagcactggggagaggagcaagtgctactcctcataacggataactgtcacttctggtggggactcggtgaagccagttttcgttgttcttttcataagaatggactgtaaaagcattcatttatgggctggtgagatggctcagcaggtaaaagtgcttaccatccaaaccaggtgctctgtgttccatccccagaagttatggtggaagggagaaatgattccacacatggcatagcatgcacatacctgtactcataacacacatcatacatatacatgataataatcgacaatttcaattcatccctttgatgcacaaccttttgaacgtccagtgtccaccaacaactaacactgggagtctgatacgttctcacccagcttccttcttgggagccatcatagtctaggctgtccacagatacaggaatgtgtggccatgcacttgggtggacatctgtgtctgcactcatctgattacaagtctaatctgacaatttccttcatcttggctgtctggtggcagtcaaacactctttacaaaggctgcagagtgacctaaaccagccatgtcctacccagggctgtatagttcaaacagctcgaaggatccctcgatccatgcagcaggtatgctcctaaagtgggtgagcctcgctactgtgcacctcagtgcaggctggtgctgtgggtatgctaaccactcagagaactgacctgagcagagagatgaaggcatactgtgggactctcagctccctagccagagtcagttatgaagtgacaccgcctactctgtgcttgcatttttaatctctcccaccatcagtgtcagagctgcctcacctcaggatggaaggaagggaaagaaacaataagaatgaagagtctcaagtcttcttcctctgtaagagcctgcctgttccttacaacttcccagaatgtcccggctacataagattcttctccatagcagcttctgtcccattcttccttacagttctatctcccatgcctgttgggccccgctaggctatgtatttcctgagaacagaagaccctgatcctcatcttgggcctccgtggtactggcccttgcctgcatgccagcactcagtacctgtgtattatattcaatggaatgtgtgctgtattttaaccccagcttcctctaccatataaaacagctagctttggaaagcaagaccaacttgtttggattttgaattacctgggggattagtaaggcaaacctccaagtatgcaagtaagggctattccagagatgttagaccctgagggctctgacctaatgaatggtttaatgccttcaaatttagagttgactattgagacaggagtggggcctcactggaagaagcagattgctggggatcatgtttcaagggtagagcttagtccttgcctctgtctgtttctttatgcttcccagtggctatgatgtgagcaatctcttctaccacacactcttgtcatggcgttcattcatgcttgcctcatggtggggccaggcaaccatggactgacacttagaacacagagcccaaattcatgattctaccttttgaccatctgactcaaatatctaacccagtgtgcaaaccacccttgggcaggctattgctgtgggtacactaagtatgctgccagaagttggtcagttcacagagaaagtccactggacaggggaaccatatcaaaagatacatgtgagtaacaagtgtgcattcattcatattaatcttggggcacacagaggggatttcccttcgagatgactttttaacttaaggttctaactttcatgagctatacaccaattttaattgcttttactgacatttcctcaaagatattcaagaacttaaaagacccatttgctaccaactttttctagctttctttctttttttttcttccttccttccttccttccttccttccttccttccttccctttccttcctaccttccctttccttccttcttcccttcccttccctcccctcccctcccctcccctccccttcctttcctttcctttctttttctttctttctttctttcttttttttctttttttttttttgtgactctgttttctcacgtacacctgatttaactcttctttaaaaacaacttcctaagccaggcagtggtggcacatacttttaatcccagcacttgggaggcagaggcaggtggatttctgagtttgaggccagcctggtctacagagtgagttccaggacagccagggctatacagagaaatcctttctcaaaaacaaaaccaaacaaaacaaacaaacaacatcttcccaaaacattaagcttaatttatatataaatgttgaaactccatgtaaaatggtgttttattggtttttgtgttgtttgtattttagttgcataataaatgaacgtgtcgaaaactgctgatctcctggtagatagacagcgcatcattttggaaccaaagtgcttaaacaaagcagcctcaagcacttggcaagctgtggtgccagtcagtccatgtcttacagaggcaacggagagtgtgactaatcttcagctgggtgggaagacactggatcctagactgcagcccgtgatagttgtctgagaactttgaagtgaatcctagtgcccgttctgtactccagcccaagcaaatgagaaggcctgggagtggggggcagacagcagaagttctttgcaggtcccaggtgattccagagtgctgccatattggaagtcacatttgtgcaagacacgtagaaggctatgcgtgtctcaagagttcacattgggttcccacctgactcagcattaattttcaataacgtcatgggtgattctttttcagcatggacctcagccctccgatctatcatttcagcccaattaatgtataatgtaggcattaggtgatattagaagaatttagtattccccaggacctagcaggtactcaatatagtgtggtttagaaataggtaagattagtgcattgctcccgtggggaaaataaaatgtgtgggtaatttggtttggtctatctctggactcaaaatataaaaaattcggagccaaaggtgtggctgagttggggcctcgcatgcatgaggaagcctgaagtctgattcccagcatcacataaactgagtgtggtaacacaggcctgttctcccagagacatcaaagggtcagagttgttatccccagcaatataggaagttcaaggccagcctggaatatgcaagatgctctttaaaaaaaattgcagaagacagattggactatgttcatttaactcccacgttcttgatctcaggaatctgaaagacagataaggagccagctcctcgcctgcagtcgttccctcccccttgctcattccttgcagaatgacttgtggtgatgtaagttcctgacgctatcaaacagcctgtgcccactggcttcgcaccctgctagattaagtaccttttgggagagccagattctctgaccacccaaacgccagtgggtagagggcagagagcagcgttttccattgcgtaagggtgcctctcattctgagtcatgctgctaattacaggtattttataaaactcttcaacacaatctaagccaccctttgttctctgtgtcctgtttcactatgtgtgtgtgtattatacattttattccattacatcaaatggactattaagtctggaggtccaaattggtctctgtctctgccctttcatctgggatgtgtgaggaatacctaagcctttcctgcctgcataattgggctgcaaaatagatgatattttgtttaaaaataaccgtttctttaacgcattgccatgagccaatcttgcatgatttgaaatagggtagagaagaaataatatggcccctccgagaaggggttgcccctgggacagttgaaaatgagcaaaatgagcttcattcatgtctacagtgtagagaccaagctagagaagggatcagccacaatgctatgctttccagaatgtccgtggccaacagcatgcaggggaattgaaggctccaaggtgatttcccccaagttcttaccaccatccaatccataccttgccctcaaaagtgatctttgagttcaggtacctagaagtgccacctgaacatcccttacatgaagctaactgatgatgttgggacaggtatggggatatatgcatgtgtgtgcatacacctatgcacaggcatggagaacgtgtctcttgttttcctctattgctctctgccttgagccctggagacaggatttctctgtgtgcctgaaggtcactgtttagtctggctggctggtcagagagcttctggattctacccatctgtgcccccgatcctgccccatggtgctgggcctctgggcttccctagccatgcctgcttcttctgtgactcctgtggattcaaactcaggttctcaggtttgcatagcaagtgttcttagccactgggccaccctcccagctcacatggagggggaaaaatgtatttattttccctttattttgcaatgatgctttttctggatgttgactgctcctttgacagtttttaacctttggaaaaatgtttccgtgctagcatcttgcctctttctaaggagaccttggccaccacacttaccttcgttcctttgtatggaatatgtttttgctccttgggccgattttctcttctgctctgagcaatgtgattatcatttgcttcactggttttgttcgatcttcttgttcctgggtcttgctgggcctttttagatttgtgggttggtgttttccatcatttggggaaagtttgggcagttgtttattgtgtacattctggaaatccaagcaggtgaacctcagacacctgaggtagttctgtagcccttctaatttcctccctccccctccccctccctctcccccctcactttttacttttgttgtttacatttgtatttttctccctattttattttgaagatttatactgatatattatcagatttaccaacctttccttttgctaatgtgtaacctgccatgaactccccaatgtaatcccaactttgttcttaatctcttcaaggttattgcatacgctttgttctaatcgagacagatcttgtcagagggctcaggtggccgtgtctctggactttgacacaggatggcagtaactgctcttcatcaccttctccgggggttctaatagctccgcttttctgcgtttacttcaaagactttttcattgtggggttctgggcttgctccttgttacgctcatttatcgttgcatgtgaacttttagatttcccagtctgactgttgggaacggacattcctggccttacctacgcagccctgtgtgcacctgctgatgagcgtacagctgaagcttccagagactgcaaatccaagagttctttccttcccagtgttctgtcctgcccagggctgctgcctccattctcctagactttggattctgtctctcctgagttcattgggccaatcaggttctatctgggctctttgccccaagcctaggaactcttcgcacagctagatgagacaccaccagtgtttgccttatttgtctcatgtgcctcaagaatagctctcctctgtctaatgcctagtatcttaaaaacagctattttgtacacattctgcttatttttggttgctttggatacaaaatgcaatctgctccctgttgctttattgtagcctgaattgatgggtgaaattcttagcttttctgaactttaattttctcatctacaaggagaggatgatggtgtttaggtgattttgtgtgtgggaactgaataagatagatgtctgtgcacctggcaattggcagacactcagcaaacacttgggtctcccctgcctttgcacctggatctcgcatcttccagatttttcctggagttaccaacctggctagactagataatcactcatgaactgttggggttttgactcagtaagtttcagaactctgtcatccatgcaacagttagctaaaactcttaccttcctacaatgagccatttgatctactggaattgtgcttttatttgtaaaataaatggcagtagatttgagaaggtttgttgtttgtggaagacagaatttaagagccctgatggtatttgaaacctcggcttggcttgtttgtcttatgaaatgtttgtcttttccctttcccatgattctcagagagctgcatgaagaagagaaaatgtgttgcccagaccttacccactctccccttttcttcttgtgtcttcccctgtaccagtgtctggaggtcgaagccgcctgcatctcatcgacctcgggagctgtgtgaaagctctcagcaaaaaccgagaaggaggctcggggctgtgcctctcactgtctgctctgggcaacgtcatcctggctttggtcaacgggagcaagcacatcccatacaagtaagtgactctcctactggacagcaagatggcatgtgggcattgcattgagccgtgaccgagtctctgtcctgagggatgccctgggagaagtgcagctaacggtcagtctggtctgggctatgagttcagtgacagagattagctttagctagtgatcatataatgaatcatcttccaaaagctatgtcacggaggcctatagtcatggtcaccattggcggggtaatgtcagcatcacgtcagtggtctgctccatggtgtggcatgcagtgaccaaagagcagtggagcagccagattaaaaccaccagggtaccactcattagatgtggatgtcagggaaacaacagataacttttagttcaagtatgacacctttattattgcgtggacatcacaggcattctgtgatacatctgatatccctacctcggtgagcttaaaaagcctggggtgggggatggggtattcatgtctagttccatggaaatgtttacccctgtatacaggttccttgccttttgatcattactgctccaggaagatcgagtcagagcttctctcatttctgggacagccctaagctgtcaccagtgcccatgaatgacccaggcttagtcaccctttgcccctcacccccattgcccaacttagctgtgtctcccactagctacaggaacctctactcttcttaaaatgagggttatggctctggctaacaactctgtattttatatgcatcacaggaaaataagatgcagaataggcatgaaaatcttttttttttttctggaatctagaaggctgtcaccaatgacaatggtgaccagttaatgatctggttcacttccatttttatcagatttaagtggaaacagcatttgcctcacacaattgccatgagtaactatgtaggggacattttgtttcaacccataaaaatcctttaaatgcaaattaccactgtgggagaaactggggactcagggatgtcccccgaagtgcctgagattcatggcaaatccttgctttctcctttcttctgatttaaattgataacagacacccagacactgtcccccaccaggaggatcttcagggaattacttggtggttataatccttattgtaccccttcttgaaattggtatcccagccacataaaccccagggtagcattccctgtccttgtaaggaccggttcaaggtgagggtttatgatgttctatgatttctactgtgaaatagctcagaatattgggggcctggcaaagaaaaaggtcatggtggggtagaactaactgtagaggctgaggatcttccaaagacaaaaattctacaggacctggttgacttccagaaaatgagaatcaggtctttgaacgtacaacttccagggccatcgtgtagatacagttcaaaatgccaccttgcagtcactgactaggtagtaagtagatcatgcctggtttattcaaattattgaattgttggtgggagagctgggacatggaagcatatggaagtctttgattaggtaaaggtaacttcctctggttacagttcggttccactgtaaacaaatagggaaaccctgtgagttgtttgtattactagttcaaggtctcttgttaggttaaacatatttataacatcggctagtcctaatggccagccacctgccctcttgggaaagctgacaaactgtagtagaatgtcaccagcccctccggacatcctgcttgattctgagagtccttcctaacatttcggccacacaggtgataagcaaagtgtttgtattgtatgtaaacataagcttaacataaatgttgtgtctgcatgagaccacgtcaaggagtggtcccctgaccctaaaagccattagctgtggacacaagcttccatcagtgaccttggtcctgcctaacaaatcaccaaaagcttgctgggaagcacactgctcagtgtcaacaagcatagtggcctgagcagccatctaatgaccagggaatctgtcctgccatcctttggtcatagtgtccgccatcttgcagaagctctgaaagacttctgttctgacattttcttgtattctcagccacggcatagacttagttagtatttgggtctgtgaatctcaattgcaaactgattgatcagtcgactagaaacaatttttttcagaatacaggaaggtaagacaaagatttactcaaatctgccaggcagttggtgacaagatcaaactgtgtggcttttcccagtttgggagacagttagtcgttgaggtcaagtgtctggctggtctctgctctcatcaagctctgcctgatattggctgcctctacacatcagggtgttcagcccagcaggacggtcgacattcccttcatcagaagacagcactctagagccatgctgtgctgcattatattagcagactaaacctttctgggcagcaagccttatctttgctttggctttcccggcaagggtatgtttcttggctgctggcttcctagtgttctgttcactttcaggggaaaaagcaaacccagaaaaatcaagcttcatatcctttgccctcccccatctctctaaaacacaagactccctcccccctcgctcttcatctgtcaccctagacaactgcttcaaaacagcattactcgtgcttgcttctgggaaattaactagaatgtgctcagaggggatatagcctgtctccatttctcttcatcattgtaccggaccatttgtcatgtgagcaagcctgaaagtgagttgggattcattacccatcctgggtgctcccacaagcaccctcaatgtgctctgaatggttctgactctgcagatgatattgcctctgcagatgacaggcgcaggcgtggagtcagttccccacctcagccattatgcagtacaagctgccttggccaatcccaataccattcatttatcagtcctaaatagtgacaccattcagaaaagcatggctgggcgggggggggggggggggggcacaaggagatcagcaaggacaccagccccctagtcagctcggcaatgacagaaagcacaaattgctcttttcttacttcggggagtctcacacccagggaaatctgtccttgttctgagatttctgacagcacatttgcaaattttctccaaggctcattcgttatagttgtctgctatttctcaccacttcttgcacagcgaggagctaggaatctccacaactgacagaatgcgggggggtggggggggtgagcagaggcattagcaggaattctcatgtcacaaaccagggttctaggggttcactttgggagctggtccccgaggagccactgcaaggatccgtcagggtgaacttggcttcagctaaagtgctctgatatcccagaattctgaggatcacagactttctagagaccctggaattctaactgcagctaagttccctacaagggaacctggtcccttttagatgttgtcatgtgatgggaacaagccctgagaaagcatgttcttcgcacactgatccctcaagccccaaagctcataagttcatttataactgtcactgcatttggagaaaccattactttaataagccacacaatgcaatacgagcaggagttcattacggacttcacaggagccaaaccagcgtacttgtgtttgtgcaaaatgatgaagctttttaattgagaactgaccatgacagagacaagagactttatatatttatatacatctatatacatacatacatatttgtgtatgtatatatgtatatacacacacatatatatacacatacacacatacacacacacacacacacacacacacacacatatggatcagcagctgggaatgtgtgtgaaagcaaggacaacaggctgcttgtttgctggtttgataatgagaaagaggctgagtgttggaacaaccacttgtgtgggcctagacagtcactgtggctcctctctggtcttgtctctgttttgggggagttatattctgtgaggaagcttgtggtaccctaaggtcattgtcctgttgagatggccacttctgcacaggtcagttcttgaaaagctgcttccaaactgtcctgcagtgagttctaggggcttttcaggaaagccctcctaatccctttgctatttaaggactttagtcccaaggcttcacttctatgtgctcattttgccagcagggtgtttgcactctgcttccaaaccacagatatttatttgctatgtctggacgcccatttcgtaaggtcgtggaatatcaccctgtatcaccctaatgtcgtgtctgtttatggtgctgttctctgccagcttgggacatggtgccgcatagccacctgtgatggaagctgtgagctccttctgtgctgtggccggagcacccccatttactcatggtcatcactagcaagtgctgggcacagacacctgtgcttgtttcactttcctctctggtggaatggttccactgctgtgatcataaaaagagaaagaaatataagaatatgctctagcagggtttaggggaaggcggtgcctcggcgggcccatgctaaggcatcccttccccctgagggaccagacacatatagcatagaatagagtttattcaggtcatggggaggggagttaagagaatagtagaggcagagaaaggcagagagaaggagagagtagagaaatagaggctggccatgaccacatggattgagagggggaagggaatggggagcaaggaggagcaagagagtaagagagacaagagaggcaagagagaaaggaggggccaagtagcccctttaatagtgggttaggcctacctggctattgccaagtaactgtagggaggagcatacctggctattgccaggtaactgttggggtggagtccagacagaataccaacattcaccaagcttgaaatgcactggggctagtctcttgtcaaacatcagactataaataagcaagcactccaggtagcatctacttccagaagtccctgtctcaccaaagggccagagcacccgtttgcagcctgtagcggaactcttgcttcctcaggctcaagtaaggtaaggctcaatattattttaaggatttcatggcacctgagcacagcaatcccctcaaaccagcaggcaatgctaaaaccaaatgccagtcagagactcagggggggcggagggttggtgtttcatacacagagaccgtttttcctaaaatgttaacacttctgctcatttgagagacagtggggtgcagatgcctgcagacaccaggtgcagcagcaggtctgccatttgggctgcacagggccaccactgctggcacaggccttaaaagtctcatcactcatcttcccagtgtctgcatagatttgggggttctccattacctcagaactgggaactcactgaagaagtttgggagactggaagggttgtgggaaactggggcacatgttacaaattgctgttagccgtgacatcccatacccctgccatcacacagtcctatttctctggattgaatgtagattacttacaggtaccataaaattaaatagatacttgtcagggaaaaaaatgcaaaagaatatcagttctaagattgactcaagatagcgtgaaattggggagaagctctgtatgaggatccctgtgtatgagagaagcgcacatgtgcatatttaacctcctctaaatgcacattaatgctggattatctcccctgatttacggggagaacatcaatttagaactatttgcacaaactccggataccagtttatagcattccctgtttagaaataaaataaccaaagtctcaggttgccaggcaactggagcagtgataattcttaggattgctgctttaaaaatgttcattttatacattttaatgactgttagggagcaaagagagcgagctcagagcatctctgggacacagaaagaagttcttttttatgagattgttcagtatcccgctctctctctcttattcctccctccttgcctcttccctggccgttggtatttttgtagttcattatagaatttacagagacagttatttttttaccaacccaggcagcaattgtctgttgattaactcctccggcgtgatatgtgcaagtcattaagggagaaatgatgtggtgtggactccgctgggctgcagcctgggttcactcatcatttcttatactctaagtttgatcggtcctctctggtgggcagaatcactcctccccaagtcggaccctcagtatggccagaacatcatagctggtattttcctctgcccactgccgttagccactgttagatagagaagcacagcctcgcgaggactggatagaagccaggagactcctcagtttccctttggcttctgactttatcttagcttaacttctgaacttgccgatggatctctcttccttctagatttgaagtcagctagcagtggactcaagggtggactaggaactgaaaccccaaatcttctcaattccagcagagcagagggggctctccctgctcctccacagaggccccaggactcagactcagatccgcagtgctagatccctttctcagacagccatagtactccagagaggaaggcagggcacagtccaggggaagaaggagacagaaggaccccactgagctgctcatgcctggctccatgtttaccgggctccccctctcatgactagagaagaagaaggaagcacaggatctccctctctcgacctttcaaagggaccagaagctaatttatgaactgctggatcagaggacgaaggagaaaattgtttccagtacttattttctggcttttcggctacacgacaggcagttagcatggcgtataaactagcgctctgtgagggttgcttctcaatgagagcatagagataataccccttactaagctgcccaggctattctaaatactttatggatatctactcgtgacggtgacttgtaaccggcaatcttatggcaaagattgggaaactgaggcacagaaaggttgagttctagttcaagttcacacagctgttacaaatcagaactatgtgtctgtctcccagtgtgttgctactgcctaatatgatgcctagaaggttgtcaatgtccagtgaacacttgtcaatggatatgaagcctccgtggaccatatggtccataaagcctgaatatagaggcttgtgagagtttagactggagaggggccagagagtccagtgtgtaatccaggtggcttccttgacctgtttctatgatgacaaagctgagtgtcttagttagggttttactgctgtgaacagacaccatgacaaaggcaactcatataaggacaacatttaattggggctggcttacaggttcagaggttcagtccattatcttcatccttgaacacagcaacatccaggtaggcatggcacaggaggagctgagagttctacagcttcatctgaaggttgctagcagaatactggcttccaggcagctaggatgagcatcttaaagcccagacccacagtgacacacctactccaaggccatacctacttcaacagggccacaccttctaatagtaccactccttgggccaaacatatgcaaaccatcacactgagactggtggctaggtgccagtggtgaagtggacagtgaaacaaagaagaaaatggaaaagaagtccctcattccagaccaaagtcacaaaccagggctcaatcaaatgtcacatgaaaatgttaagagctgagcttagtaatgcaggcctgtgatcctcattactctggtggtagaggcagggggattgtgagttcaaggctaatctgggcaacttagtgtgcgactctgcctcaaagtaaaaagtaaaaatagtagaggggtgctacacaacttagcagctcaatacttgttcagcccccagtaacaaaacagtgcacgcacacacacacacaaactatgttcagtagggcagaggaaacaggactctgatagcctgcaatggagcccagtggcctgggtgcttcactcagtgctagccatggaggaacttagccaatcacagacatttcacttgtcctgagagtctgtgaagctatctcacatccccatcagcaataaagccacatatccccatggcacctatgccacacagctctcctactttgcctgggagctccagcaagaaaagtgggtctgttccccaaaccagagagctgggtgctgcccacaattgacagataggaccatggttgtgggttttcttccctgggatgccactgtctctgaggtgttgagagagcaggctcctaggcccctataagtagaagaggttatcatctgctgtgtcctgaagtttggcagcatagccgcttagtaatgaagggatacgcacgcaggaggtgcagatggtgccagggttttgctgtgcctgcggtaatgagcttcctcaagcatctagctgagagtggaaacattaggaacttccccagatgagacgatcagtctcacaactggaatttgtcaactttcttcaccctgagctcccaaagaagtgtggtagagcaggacagctgtggtctctaaatgagacaccgccgccgccacctgggctggcagagccacactcaaggtgaggccagggaacagggatgtcagcaccacttttgggactcagggactatttcagcccattttcaaccttgtgatcaggattcattcttgccctccacttctgaaacaaaattagatcccatggacaaaatgtctgggaggccctttgagaacacacatttcaaaggtgagaaggccagggtgtgagtatattctaaacttttttttttattagatattttcttcatttacatttcaaatgctatcccaaaagtcccttataccctcccccctgccctagtccccaacccatccactctggcttcctggccctggcattcccctgtactggggcatatgatctttgcaagaccaagggcctttcctccctttgatggctgactaggccatcctcttctacatatgcaactagagacacaattctggggggtactggttagctcatattgttgatcctcctatagggttgccaacccctttagctccttgggtattttctagctcttctttaggggccctgtgttccatccaatagttgacttaactgggttttcctgcctcccttcaaagcccaaaaccttcacagatgctctgccctctgctgtattgatggagagattggctgttacccattgtgataaactactgagctaaatgtgagactccaaacccacagcttatggttatcttttatgataactaattgtcacgtcacaagccattctgttcattacagaaagcaaacagctgaaggaggatgtcttttggttagtccaggccagtgcacagaggagcccaagatgcccttaggcaccccgagggctctgtggttactcgaggatagcttgatttaggcacaattaggcactggaaaggatggagcatacaaatgagtcaggcttaattcattaaaaaactgccttgaacattaattgagcttcaatcagagtattcaaccataaattctcacctgtttcacaactgattcaggctcaattgagcattaatagattttttttggttcatgcaaatgaggtgataattcattctgttgtgtaattgaataattttcaaatagatttattcacaggaacagttaaattgtgccatgttgtctaatgtcgctcatgatgctttaaccaaagggaagcggggcatcactctggaacaatagagatgtcacgggacagagccggttccggtgaagtcgccgctggtgtaaagagcagcagactttaagacacctggcgatgttcacttggccttttaggaccacgccccagatgctatatgtttttagggtcaatacaaatttgtaggaagtggtttctcagtttggcagccaactgccccgccccccatttgtaagcacacactccctagttttgtgccccaaaacaccagccttcctgagagttcagtctgtcagcctgcttgttgagttccaggccagtgagagactgtcacagaaaaacaaggttgacagtccctgaggaatgacaacagaggttgttctctggcctccacacacatgaactgaaacacatatatacatgatattttaaaatgtgtattccttcccgtggtccccagggcctcctcgggatgccatctctgcttcaaagccttcctgaggtcttctctcccaaaatattgctgcagaacaattctgtttttttgtttgcatcactcagtcccctgtcatatgaactcatcacgataatgacagcctctcccttgggttccatattggtatatactcatttggactgacccaacttgatcttaaagcccgtgtctttagtaacaaatgggaatcgacccaacaaacttgcctccatgatcaaaacagtaccctgtagagctctgtctgatgacctgtcaatcagcaggtcttcccactctgtctgcttaaacatacgttacattcatgctccttggaatatctgactgtatttctatctgtgatctggacggctttttcttgtgtgaagatctagagctcacacaaaaagctccacagtgaatagtgacagtgtcactctaggcagcaagtgcactgtcagaagcatagacacacttgcatcttcccccatggtcagagactagtgggtggcagtaaattcacacactgaaccaatttaattggcttttcttcacttatagtactgagtctacttgattgacctggtcattggcaatcacgggccctcttattccaggcttccttactgagattaactcttgcatcacacactccttttcatacaatagtgtgtgtgtgtgtgtgtgtgtgtgtgtgtgtacacgtgtgagtgtgcatgtgtgagtttatatatatatatatgtgagtgtatatgtgagtgtgtgtatgcatgtgtgtgtattgaatgagtgtgtgaagtatgtgtgagtatgtgtgcagtgagttggtgtgtgtatatgtgtgagcaagtgtgagtgcatggatgagtgtatgtgaatgaatgtgggcatgtgtgtatatgtgagtgagtatgtgagtatgtgtgtgttagactgatgatgaaagggttacagaaatggcagtgttggaggaggtcttactgaaggtaagatctgggagctgatgcaggtgtgaagagggacatcataagtacttagttaaggcagtaaggaccctgttgtcgatttgggtccagaaaaagagacatgcaaggggctgtatcacgtgaggagatatatccaggagactgtcgtgattgctccctgactgtgaactgaatgttctgatgacaagggggtagttcttcatatctcagtgaaggtctctgcatttatacatccacacaaaacccacaactctaagctcagaggtagataagataggaagccagttatgatgaccatggccaaggaacacaggtgtagggctccccaaatgccagcctttcaatgtggaagcagattcatgaagattttatagtaacaggacaaagccataaaacactccctaaacacattggtgggaacagttaataggcagttaaaggaaagttgagaaagcactactggaggccttgatgctgtctggtgactcatacagccttctggttggtgctatctagggttttcttaagctaataccttccaaaagcttcttaactgttagcctcaggatgttaggggcaacacaaaagtaggcaaaggagggctcttcagaggactaaagaaggccggagataaattctgctccggaccggcaacattccaccctcgctacagtcaccgaagatccaatctgttagtgagccttccaggtttcagtgtgaaggtacagcttttctgagagctttcattcatacagacgatcccaggtatcagtgtgtaaccaaccattcattggtctggtgagctctgtaagttcacaggccaggtttcactgtcaggttttgactggcccctgtgtcaacacgtttcctgatttaatttggtaagcccagagatggtggcctctcgactgcttgattagctgagctgtaagcctgtgcaggatacagggtgacgctgttcttatccatgttctcttgactgcatgagctctcaaaatgaacactgcactgtttcgtaaatggagtcactaaggctgaaagccactgccctaggtaataggcagcaacttagaacaactatggctctctgctttctgctgtttaaaagaaaattcaggtgtcctgctcctcaccacccctaattctgacctttgctcctcatccttacgtgtggggatactcccagtctctgatactcctcccttttctcgaaggctggttccctctgcatctcagttacctgttgttattcaatcccaaccccaccctccaattttttcccccttatattttgtctggctgtctggttatttaaagttgaaggctaaacccagatctgttttttaaatagagcccagagcaggaattggtccttcctggtcattttgttgttgtttatttctttgaacatcttaatttccttaaagatgttaatcaactttctgttgtttacttgaaatccatgtgttcatctcaatcggccatctgcggttcctgctggatctatctcctggtgcctcctgtcctcctgtgtttattgttgtctggggactgctcctttgcattggcattttattcctgagacctggataagaagggtttactttacagagtgtttgcatttagttctacgaggtgccagctaaggatagtctaaattgtattctcagcttgaaatattttggaccacccagatcctgagactccagacgatcagcctgcgtgtgattcagactgaagctcaaattcttagagcaatttcctttctgttgttttggtgttttagaggacaagaaaatcatgtcttcaatatgggagaaggacatttgttggagaaggagaatttcctaataaaatgtccatattggactggtctgaggctctgtctttctatttcacaaaccaagcccacctccagcccaggccacatgaaaactaaggcctgtgagatgacctggctggcaaacagcttctgagtgaaagcaagcatcactgttctccttctcgcgagtccccgactttgactagagattgtcttgctcttttgcaagctcaacaatgcatttaatatgaattttacagctatccacactgtgtaattgtgcttggaaaggtcttttggggacatgactagcagactgttctttttccttgttactcacacattctctctcttctgagaagtgagtatctgagcgtagactctggatacccagatgacccacgagacagtccagtctatccctttcagaattgactctgacagcttctcagcctgttgactaagatcacgagcaaactttactctccagcattcttacacaatgaaaactatctctgcacatcaaagataagcagttaaaacttcttgattgcttctctgaatgttaaagagaataaggaaaattgtttcagctatagcttaatgtgctttgctctgcctctgtcttacctgactaggattttgcaatgtctgtgtccctgaaagacccatgtgtgaaaggcttggtcccaggccacagtgctaatggtagcgggacctttaccaggtggaggctagtgggaggaagttaggtcgttggagagtgcacttgagggggatactggggctctgtcttccatcactacctcttgctccctggctcccaaagggtgatcaaccttgcttcctcacacacaaatatttgctcttaccacaggccaacaaggccaatgggctgtggactgaaatctctgaaactgtgagtctaaataaacctttcaaccctttaagttgattacccccgttatttttgttatagtctctgaaatgtaatcatggcagtgctgttttccctaatgctgtatttttcaacagttatcttaagaccaccatggtttttgtgtgataacatataaaattatctgtgtattttgataactgcaactttcctttctcttggcacactagaaatctatgtgtcctacgatctatagtatatttgtttcagtaggatacatttttttcaagtaagaaacaatcaatacatcaattttcagaaaagaaaaaagagcttacagaatttcttgtgtttaatcctttatgtggcttgaactcttgtcctttgtatcccagggtcctctgtttccaggctttgtctttaataattgcaattcattaccagcctcaaaaccggaggattttttctttcaattattgagcacttcattaccaattacaatttagtttgaaaaaaattcaattctaatttagaagacttgtttctaaaactttaacactcagatttgagtcatgaagactgctttgttttgtctactataaagctgcctgctataagcaattttgtgctattccagtttactctttaaagtctcaaatacttttcaagtccaactagtgacaggaagcaaagagagaactgcatgcttcctgaaatttaagatccagccaatcttcctcacatagactttgttgttcagttgcatcctgatggaatctaatgaatttttataacaaaagctcatgtttctctggtagaactgatctcagcacagttattagttgtgtgagtgtatcagctagaaagacagtcaacagaaggtatttctcagtttagcagaactcatcctgtaaagtatggcctcctgttcaccacacaccatgcatatggatagcgagccagaaggtccacccatactacccattctattttggtgaaagtcttgtaatggcaagtgagaagaaatccagactgtaataaacagatgggatacaagataatataaaaccaagacttctgggcatcccaggacatatatagggtccatactatgatcctgtctgtctcatatgaatttgtatttccagggcaggtagagagccaatagtatctcaggttataaatgcatgcttgcagaacaaatgactccaaaactacctgtttgtctaaacaggacattctgtatgccagtgcaagggactaagaacaggacactttggagctttttaacaaggtcttccaaaatcctaccatgggctggagtagttcagcagttaagagtacttgcttgcagctcttccaaaagacctgagttcacttcctagcacccacactggtgaccttcaacctcctttaagtccaactccaggggatttgttaccctcacctggcctgtgtggacactacacactcagcatatactcacatagcaacataaaatagaaaagttttgaaccctaaatcccaccacacaggaggctccctttatatttagctccaagccagaatggtacttgccactctttctgggacacatatttatattgtctatgtctaaggtgttagactatgccaacaagtttgaccagccccttttagccaagacaaactgctacacctcagtaggtcctgtgaacttcatatctggatatctacctaggaatagccaagtgtttataacatgtacacatcacattgtattgatgagctgaccagaaccttgccatcagattaagaccacatagtcggtctattggtttctctttggggacactgttgtgcccactccttaagatgacaccctgcatgtaaatgtccttcctgtaatatgccattgaggactgtgatatgtgtggacccaggcaggccagcttgctctgagactgagagagtcagtctgctcttacacagacagaagagtctgagctttgtaggagcagtactcactggaaccccagttcagttggttttcttatgacactggatccttcagacaacaacagaaaaagttatcttagagtctaagacttagatgttgtggatttatgacgtttcatggggtgaagtcttctcttaatggataagtttagccattagagacttgcttgaatgtttataggaagataactatgttagaccccatgctaggcctggatatggaaagaacagacctttgccctcattctgtaagaagccagcatcttctatggtatttgggacatctgccatcccacagtgtaggctcttcatgatgctacagaaaagcattgacttttaactggaaaaccaaccccctcccaaaacaaaacaaaatcaaaaccaaacccaaccaaacaaaaggacctgaggaaggaaggtgcattgaactcctgttctgtggatccagtcagcaggactttgagaaacttgtccattaaggcttcttcagggaacctgggagtgaggaacagggacggagcccttacttagcacttgcatggctctggattctatgctggactctggaaagaatggaaaggaaagacaagagtatattagaccctgaactcaaatcacatttattctgtattttaaactcaaataactgactttggcaccgtgggtggaacaggaccactgtgcccctgacatagaagcccagcccagatacatatgactactcataacctaatgttaacaaaatataaagcccctgcaatggtagcctgtcttatgaccaagcaaaattagaaccacagggaaatgcactcttataacacaatacattttttttaatgtctcattccttcctgtatccctcattaaagtttctgaggcactctctgaagttattaaactgtgtgaatggtcgcctctgtgttccatctttcctcacacttgtacctgtggtggaaactagtcttcaacccagtttcctttcaattccctccaattactgaggcctgtccttcatagcagcacacttggcccatcatctgagaaccctggcatcttgtttctctaaagcacacaatacccagaagccactgcaacaagcactgccctcgtcacctactgaaatttaaattctaccctgtctcaaaagaaacatagacaggaaagtccatagcatgcatgtatgggaaaatggtctttcacagctcttgggctatgactgggagtggcctctaagtaataaagaccacattgagcaattgtcacttgcacatccttagtcattctaattggcaagcttgttgtagcaaaaaaattggaagggttgtgagccacagatacaaaaaaaaaaaattaagattgtgtctaaaaaaaggtgttatgtaaaaatgaagaatctcctatacatcaaaagataccaccaagagattgaaaacaaccaactattgtatctgttttcagagaaggccaggcatgttgtcgcacacttttaatcccagcactcaggaggcagaagcacatgaatctttatgatttcagtgtcagtctggtctacatagtgagtttcaagccatctatgatttcatagtgggaccctgtttaatatttagaacttttaaagttgtcctacaacacaacaacagaagcacttaaacactggacaaaggactttaacagaagtttctctgtagaagacatgaaaatggccaatgagcacacgaaagcgtacataattgcactggtcaccagagaagtgcaaatgaaccctcaataaaacaccatgtcacagtggatgggaaaaaggtgaaagtcagttttacataagaatgtgagaaagtgatgggctttatggcagcaggatgtcacagctgtcccataaacataatcccaaaccaagtgctacaaaggacactggtcaggagccaggccagagagacaagacaaggctcactccaaccctgaatgtcatacgaactcctgaaagccttccaaggctgaagacatagagaggccatttgtgggcctttggggcttagttcagtggatgagagctttgctagtacccgtgaaaccctgtgttctgtcatgtacacacacacacacacacacacacacacacacacacacacacacacacatatatatatatatatatatatatatatatatatatatatatgcccaggtgcacatatacacacacttacagatacacatatacacatgtacataccaaacatacacacatatgcacgtgcacactcatacaaacacgtgcccacagacacacagacacagagactgggctgagatcttcctgataggatgtgtcactgaccactgacctctctcactgttaatatgtgtcttttttttttttaatagcatagggaaagcccagggatgtgcagcctgatggggcagagtgaagagatctccttggttagtgtgggggggtcagactagggtcaagcatttgcagataaagactcctgggattcttagtcacgtgttctctgctgattatatgtagaaaccagaatgagataagttgactctgaaaactaaaaatagtcatgattctaatctaatgtagccacatgcctagatgccttgactatcctgttcaaccccttttagctctttccaaggaatgtgcaggaaagggactcacatgagtttctggagctacaaagtaaaccagctgccattcatcttgtgcctgggattacttctgtgtgtgtgtgtgtgtgtgtgtgtgtgtgtgtgtgtgtgtgtgtgtgtgtaggggcgggtgctggaggggcgggagcacagaggtcaacattagctgtcctccttaatcactggctagcttatattttgaaacagagtctctcattgaaccaagaggtcattgagtagctacaatggctggccagtgatcccagggacccacctgtttgtgtcaccagtacttaaattgcagatgcataccacagtgcctgatgcttttattggcaggggaggaggaggtgacggggctgagatccaaactcaggtccttgtgtttgcctagcaagctactctgtcaactgtgtcatctccccagccctctaccaaccccacctagctgtgatgccaactctgaaaggggagataacggagtgagatttaaaaaaaaaaaaagaggccttatcaaatgccacatccaatacatgcttcgtacgcatttgctacctgaaaccaatattgaagctcaaaggaaagcaaaagaataaaactattccagacacataagcttataatgaaggatacccaggtgatcatgggacgacaaggcagcaatcaagatggtagggagacctgagaaaagatactgggtgaaatcagatttcactgcatcaaagattccatttgtagtcttatttttctctcttctgaagaattctgtgaaagtccaagggcacagacaggggtgagtagaatcagggaagtgcttctaggttaccatgacaacgcaattcctgactttatttttatgcctcatcagcccataagtccagtttgaatgccatcagaggtctctgacattaagatgaacatgtactcccggcccaagaatgatggaaacttgaaaggaagcaaagtttccaaagagtacagtgacctcatctttactctgaagacgtgtgatagccacactttggcataatggagatggtccctagtcctgccccgtgattaaacagccatagagcattgcagaggctagctcacaagtgtcaggactgtaaaaatggctgtagcaaagctttgatgattaatgataataagacttcttggactcaataagattttaaaggaagtgaaaaactaatgggaaaaatgtcaagacagtagttatatctagctgtggtgggagtattgacattggtgcttttgatctggactgattaacaatctttcatcagaccagtttgtatgcgtgatgcatgctgaaggtcttaatgttgaatcactaagcacaaccttcatagcatcccttactttgttaaaatatgagatttttggcagttcacagactcaagggacagctgtatatatgccttttattctattggtctactaatttgttctcttggctgtcttttttttttttttgagggctctttttctttaatgtgatgacaatcctagttcctggttatgctgaagtgaatattaatgaatgtagtcttttctgttcttccctaaagctgttaagtcatatgtattggctggataaatacaggctaaacacagttcccattgtgaaggttcttacagtcttgttagaagagctgagagaagcctgagagagtttttaaggtttgagggcacagtctccaggatgctgttctgcccaagatttctggttatttgggttcaaggatataggagatttagaagagtctgcaccatacttctggtgccaactctgtggttagcaggtaccccaaaacaccatcattcagtagaaggacttacagaacacagtaaaagtatccatgaactgctagactgcatgaaggggccggttctgcatgaccaaagttgcaggatctgcacaacacaggtttttgttgttgttgttgttgttgtttctaagacagggtttctctgtgtagtcatggctgtcctggaactcactttgtagaccaggctggcctcgaactcagaaatccacctgcctctgcctcccaagtgctgggattaaaggcgtgcaggatatcctagagaagttctagtgaggatccaatattgatggtgtagcagaagccagaggccttgaaccagaccaaggactcattgcaatgaacatttgcaagtaaagaagtggggacagaagggtgcactgtgtgacacactgtgacacactatagcttccatggagaaatgtttgttttttgtttgttttattttaaaattttccttatttttattttttgttttcattggtgggggggggggctgcaagggaggagggtagcaatgaaaggacagggagatgcatgggcttgggtgcatggtgtgaaattcacaaagaatctataaaaaggttttttaaagtgcttatcacatgaaaaggctgtggcctctaatcaaccctccgaggagatatgtgagtgaagtagggtctaggaaggttctagtaactgctggacatgtcactgtcccaacatgtgcatgtgaaatatgcactgaaccagcagtgttggcatgaactatgacatctacaactattactgtggctagatagagcagcttcccatatggttgaccccagtcccagagcaatgatacctcatggcccaaagccatgatcttaaaccttgtagttgatcaggttcatgttacccaaaaatctgatgtgaacaccctccattctaaacaaaaatgggtcttaatggctatcacagggtttatctcccaaagctcacagcaaaggggagctcttgtgagaggcgaagctgaattatttgctacataagtgtatgcagacaataaatttatcagagatcataaattgggtgactggggagcaggggatatggctcagtcaataaagagtttgttgcaaaggcatgaagacctgagttcagatcctcagcccccatgtggcccagcagcatacatctggacccatcactcccaggatgaagggagtagcgagacacagatcctggccatcactggccatctaggagagataagtcagtgagattcaggttttagcaagagaccctgtccccaaaataaggtggagaattgaggaaatcaccttacacattcagtgcacatgtataaacatacacgcacatgcacacacctgcacacacacacacaggaacaggcacataccagctcacacacacacagtcacacaaagatatacatatgcatgcacacacacatagatatacacacagtcacacacatacacacagtcacactcacacacactcacataaacatacacacacaatcacacacagacatgcacacatgtgtacacacacatagtcacacagtcacacatagacatacacacacatgcacatatgtgcatacacacagtctcacacacacacacacacacacacacacaaacacacacagttgcatgatagggaagggcttattgtgagcttcagtgaccagccaaacatttgaaagagcaacagaaagaaaactgagtgtgcttaagcaacagaaccctcaggaaagacataagtgtgtctaaaaatgtgagcaatgggcttgtttttaccctgtatgagcccagaggacagagctagtgaccttcacttgatgttgtgaagactgaagtcaaacataaggaaaagacttctaataaggctatctgaaaaatatacagactgcactgcaaagatagtaagccccaccccccagttgaaaatcatcgctacacaaagcatggcatccaaaaccatggcgatccttttcttaggaaatgcaaagacctccctccaagaatccttttgactctatttctttatgcttatatcaatatgttttccatcttgacccatggttgtattctggagttggtaaactatttacgttctgtttctgagtctatggattgtctttcaaatttctgaggtagtacctgggtgccagggctgtggagtgagtgatactctgagcagactgtagatatatgatatctagagtaatttagattctacctcctggcaatcacagagtaccatcttatcttacagctatgagaaggaatgggatattaaataagtagagaacggaaggttcctgtggaatatgagcagtttgctgagcaactccatgcttggtagacatgctagttggtataagtgcagggcccgttctctcaagttctatagccagtgagaggcagggctagctctcctgtgctcatgactttggggccagctttccacactgccataggtgttggggaacatcactcctggatcctctccatctcatggtagatgagggccagctcatctgcaccctctccacccaaggccagctctactgtgaggcctgggtgaggtgcaagacccgctttctcaagtactggagcaggcgaggggcagggatagtaatcctgctcccatgaccctggggcagctctcccaactgccaaaggtgacaaggggcaagggcatcacctctgcacccacaccactcacagcaggtgaggcagggtctgctctcccacactcaagcccccagggactgctcaccaataccttggcctaagggtcagctccactgctttgccagggatgctctcccgagtgcagccatcaatgtcaccagttaaaggtgtgtccagtccctaggagtttttataactaaaaaaagttatgttggattttataggatgggtttttcttgtctaattaggagaatggcgataatttcctactttggtctattaatggactatctcattgattgacttgcataagtcaaagcagctttgcatgccagagacaaatctctcttgatcataatgtataaaatttgcactgaattcaacttactaatgtctcatcaaagggttttacatcactatttatcagagatgatagctatagctttccttagtgtttttgcctggtttaaagtaacaactgttaatatgcataagatagatcttccttgcaacttaaattttgaaaacgctgaagaggtattagcattattttctctttgaaatcttagagtttagctatgaagccacccagtcctgggtcttcctttgttaagagactttaactactattttaatctccttttttcttgttttccttctcctctctctacaatataattgagggttttctgcatttgtttatagatgttaacacaatatattttttatcctgtaacctttctagtctctaacttatttctgccccaaagtttactctttccttcttccctgaacccccaccccaactatggagttttcccctcttcttcttccttgaggtgccatgtcaagctggtgctgggggcagagatctgggggcagggttgtccattgctgtaagaagggctcttggtgttgctttcatgggaatcctgtgtgtgaaggtttttcactattcccactttctagatatttttctgtcttccatttcatttaatttggccccttagttgtttgggcacatattaatctccacaaatttgcttgtgtgttgttattttccctaaaatgaggagtcacagtatcaggtctgatatgacctgtaagtggttgcaatggcttgaggttccagactgggggtgttcggaggcctgtaaagccacagctctgaactcagggtcccacaaacctataataataactgggacttggagcatggcttactctctgaggcctagttagatgcacactgtccacaaagctggctgatgattccaaagcacacccagcagcttcgacctagagcgctgggctgctgtcatgatgctgatcgggctaggatgcacagtgtacagcagtggccctgggctggggtgcacagcatacagcagtggccctgggctggggtgcacagtgtacagcagtggccctgggctggggtgcacagtgtacagcagtggccctgggctaggatgcacagtgtacaacagtggccctgggctggggtgcacagcatacagcagtagccctgggctggggtgttcagcgtacaatagtggcctgattccaggcacagatctaatttgggatccaaagtcaatactgcacagtagcatctcagacccaggatgagaccacattgtcgtatcactaaaccctggaatgatggtgcactgactgcaccccagcaagcacagagctgtggcttgaagttcaagagtcaacaatcaggacaacagtgactccaccatccagcatggtagagtggctttgacagctcacacttcagggttctgattagttccagggaagctgggtgctacacctgtttggccttgagggaaggagctctggatggggctcacagtgctgacttcctctctgaagtagctcagtagtgttgctggaatttttaaccctaataagcccatataaaagacacacaacccagatattttaattataagccatatgcctagattgggcagatctagggctatgctaacttattccacagttataagaccccttgatatttgtggtttctcctgatcatgatattctggtctatcgtggcttctcctcctcttcctccgtcctctctccttccctcttaccctgccacccctctctaccctccagtcccacctttcccctccactgctcagtctcaggggaaaaggttggtatggcatcacctgtgtacctgatggtctgctggttggaggcaacctttcttgaggaaccagtattaacattaggatacaaacagcatcaggccaacccactacacagtagtttagcagggggaccccacttatggcttagtgcctataaggaccacagggctcttcttcaggtgagcaagttggtaactgttgtggccagggtccttctaactaccttccccacaggaaggagtgcctgcccctatgtctaagctgatctcaactagagtcctaggcagggatgctgaggccagacatgcgcttccccttactacagggttgccctgaatgtctgtgctctggaacactcatttggtttagttagttagtttatttttaaatcaaaatatagttgtctacttgtgactttggctgtctttcagcgttcctgtggtagggttacttagtcagccatcttgctcacacagttgctgttaccttttactgatggctatcatgttggagttgtacagggcaatttccctgctcaaatcccaggctccttcagagtagcccatcagttgctcttacctgtgtcagccagcgctacacaaatgttccttaaatgagcagctgtgctccctaatgagctaattagctcagtggacacggacagccaagcagctcctttgcgagggcagaccacttctgtatgtggccggaagtggtgtgagctgtggctgtggtcagggcctggtgctccagtgatttctaaagccaagtattttctctctttgccagtttctgtgcgattgactttgtttcataacatctaaaaagattcaggagccccatagacagctatccatcaaatacagattatagaatattatagaaaccagggcatattcagtggtatcttagttagggtttgactgctgtgagcagacaccatgaccaaggtgagtcttataaaggacaatatttaattggggctggcttacaggttcagaggttcagtccattatcatcaaggtgggagtatggtgacatccaggaaggcatggtgcaggaggagctgagagttttctacattttgatccaaacaagactgctttatcttagtcatttcaataagtatacatggccgggataggcaggagctggaccatgtgttcataaaagatgctacatggatgagtgatatggtttcctctcaggtatgctcagttctgcctcattgcctgcccttcctgctgctaactaacaagtcctccagagccagaggaccttgcatcttcactctctctagctagcctgatcctggggccatggcagagggtcttcatgcctctcttcctgcatcctcagtattgatttggtggtgacgaccatcctaaaatctctttggaaccttgagttgccttcagaatgctcagcgcagcctgcagccgatagcctttgctacctttctctcaccggccttctcggtcatttttgtgtagagtcaaaacatcaccatgaggctgaaaaaaccacagcttcctaagcttttctgcctcactcgagacctgcgattagagacctgtgtccatctggctggcgactctgccgactttctttccacgagactgcagaaaacatcagttgccaagcaacacacacgtcgtggcttcttccagccgtatgcactccctttctaaaagccacaaatatttgtctacaactgtgtcacacatgtggacggtggggagcataccagacagcagactggtggaatgttgtatcattgtcatttggtctgggatcttttcctgaagacttacacagagtcacacggagagccgggagtgtgtgcctttggccgtgggcatcgattagcaagacttcccacaaggaactttatggtcgagtcagctggaggaggcagatttgcagatcccagtgttgtacatttcctgctagataaaatttctttgtaatctccaagccaatattcctgatgcttttatggtgatttaaggacagtgcacagagtggaggaaatttttgagtccctgacacacatgtcccccgctgaagtgtgacaggttgagcactgcctcacgtgctctcggcttcagtgcttttgaattttttatgctttctgcccatgatttcactgtttgaaacgattccccggcatggtacggaagtgctttctagtgagaagaggcacaaaggggcagctctgtgcctcatagagaaaacatgagagttagctaagcttcgttcaggagtgagctcatgggctactggctgcaggttcaatgccgatgtagccattgcatgatacacccacaggggaggaggatttgcctacagtaagcgaggccactcccgaaatggggaaggtcgcatctagagatgagcaaactgaatatgaagactcatcagctgctgcacaatcaaagaagaaagtgatgaactgtgccactctgagacttaaggtcagaggcctctactgtcctatctctcaagaccgggaaaccattgtacactcttggcagtattttatcataaagaaatatgatataaacatcattttttaaaaatcccagatgactttgaatagaaaagtcacctaaaacagggtaccctattgacatttgaccaaactgtcattttcccagaaaggttcacaggaattctaactttgtgtttccctctgccagccatgcctcaggatcccataaattgctgtttatgggtactttatagtgtataactatcatgaattataagagttaactgcatatggtcatagcctaatccaaacagaatccatcttctacttcctgtggttcactcagataaactatctttgctaagtcaagactggcccccaacccccttcctgagacatccctgcagagtatactttgaggggagttaaatgtgatcagatacccccacacttcctcccttttcttttaccacttctatctcctgattcttttgccctggtatatttacaatttgctctgaaactggaacacactagcccatcattcccaaatgagcaccttaattggtcccaggtaggggaaaaaaaaaaaaaacccaccatctttcttccccgaagccagacataagtcacatgagaaaaaaaaaatctctgctggcagtgaccaggatctcacatgaagtctgttgagctgatggtccctctccaggggattctgtagggacttggacttgagaaggacattctgagattgaaacacatcatctgaacatgaaatgtagccagaggttctcccagcctcaggtggggtgctccagggaggagacatatttcacccagcaggtgcctgcatggggagaattcgaggagcagaacccttaaaaaaacatggcaggatctcattagagcaaggacagaacaaggactatgagccattccttcaggtcaattctcaaagagcctagaaaccatcagaggtgccctgggccttattatcactaaccaggatagtggttccacatagcaactgcaaagttcccaggggtagcctttctggaaagttctgcttcctgttgctaagtgactatttgggccgtgtctttctctgcttatcagtaataccaacgtcttttccttcagtgttacaggctgcaatggcagggttgagagacaatggcagtagcatgcctctgtgctataagggggatttcccatgtgttgtaaacacgtgggacttcagtgcaggttcacagcatgctgtctctattacagggattgccctgtgtgcagaaactcgctgagaagggctatgtgtgcagatagcatgccagattgctggtcacaaagccattttcttctgatcccctctccttgtttctattcccaggcctcattatgtgctatgtcatatgcacacaaacagatacactagaatagcccatcgcggccaggacagaagtgccaagggaggtgtttgcatgaatcccatccttggagttagaagcacttgctcagctgccaactgcaaatagccccatgctgcaaagcaatgctaattagtatgccattaaaaaaaaaaaaaaaaaaaaaagaggaagaaaacaccacccacaaccaaatagccacatgcaaacctgaagtcctgccctgacagccagcatgaggcatggcccactaatgcagccttaatccactttgtttggcagggagagcaagctcaccatgcttctgagggagtctctggggaatgtgaactgtcgcaccaccatgatcgcacacatctcggccgcagccagcagctacgcggagaccctgtccaccatccagatcgcgtcgagagtcttaaggatgaagaagaagaagaccaaggtaagggctcttaatgggagggagaatacactggggacaagagccaaatcacaaagagccaatcagtctcgccattctctgaacaccaaggactgtgcaaacgtggctgctgcagcccctgtctcagaacaggaaagccttccaacaacacgggagaaagttgagtgtccttttcatggttgatgctgtcacgggtcacccaccctgaccgctgacagagaccactttagtagattgccgctataagatgaaaaatgtcccaggggtgggaaggaatcaggctcctccacggtcacagaggtgaggtgtgcagccagcaatctggctccagaaaggatggctaatacctcacccctccccgccatgcggttctgccacccctgcatgcccaggagcctgcagccggtgggttcttgtgtcagtgtccttgtgtctgcattgtgttggcagatgtcagtaggctgacttccttgggcagaagcaaagccagggtcgcagtcaaatggcatcagtgtttgagaaaatcacatttctgagccaactcaatacttgagacttccctttcttcctcctttgtatacgccttttatgtatataaaaaggcaaggcttcatgaccagtgttctgaggcaggggaatagtcttgaggaagtcaggtgggatctggataggtcgctacctttcccaagcagactgatacattagtgtgcaaatgggaattatcatacccagggaataggacaggaaggtattctggcatagtccagtgagtgccagcccctctgcaggctggtcttcaagaccctagcgccagtcagcagcttgggcctgcagtatgacacaggcttcctaggagggaaggctatctcaaaaggactccccattaacaattctctcgtccacgttgcagtacacatcaagctcctctgggggagaaagctcctgtgaggaaggcagaatgcgcaggcccacccagctgagacccttccatgcccgggctccggtggatccagaattcccccttgccccactgtccagtgatcctgactactcctccagcagtgagcagtcctgcgacaccgtcatctacatcgggcccaatggcacagccctgtctgacaaggaactcactgacaatgaggggcccccagactttgtgcccattgtgccagccctacagaagaccagaggtgacagccggccgggggaggcagcagaggctgcagccagcaagtcagaaagggactgtctgaagtgcaatacgtttgctgagctgcaggaaagactagattgcatagatggcagcgaagaacccagtaagtttcccttcgaagagctgcccatccagttcgggccggagcaagctggcagatgtgctcctttaagccaagcagtggggccagacacaccctctgagtctgaaaaggaagataacggctcagacaatggccaattgaccgagagggaaggcacagagcttccagcctccaaggcacagcggaatcggtcccctgcccctactgtgacacgcagcagcagccccagtccagcctcaccacggagcatcccgggcagcagtagccagcacagtacctcccagctcacacagagccccagtctccagagcagccgggagagtctgaactcatgtggcttcgtggagggcaagcccagacccatgggctccccgaggctaggcattgccagtctgtccaagacctcagagtacaaacctcccagttctccctctcagaggtgcaaagtctacacccagaagggggtcctgccctcctctgccccaccaccttccctgagcaaggactctggcatggtctccagtgaatccttgcttcagcccgacgtgcgcactcccccagttggaatgagtccccaggttttgaagaaatccatgtctgccgggagcgaagggtttcccggaactctagttgacggtgaggaccaggaaggccctccagcggactctaagaaggagattctgagcaccacaatggtgactgtgcaacagcccctggagctgaatggtgaggatgagttggtcttcacactggtggaggagctgaccatcagcggggtgctcgacagtggacgccctaccagcatcatcagcttcaacagtgactgctccgtgcaggccctggcctcaggctcccggcccgtcagcatcatcagcagcatcagcgaggatctggagtgctactccagcatggcccccgtctccgaggtgagcatcacgcagttcctgcctctcccaaagctgggcctggatgagaaggctcgggacgcgggcagccggcgttcctccatcagctcctggctgagcgagatgagcgcgggcagtgatggcgagcagtcatgccacagcttcatagcccagacgtgctttgggcatggggaagccatggcagaacccccagcctcggagtttgtcagcagcatccagaacacggcagtggtgtgcagagagaagcccgaggtgggccctgacaacctgctcatcttatctgagatgggggaagagtctggcaacaaagccgctcccatcaaaggctgcaaaatctcaacggtgggcaaggccatggtcaccatctccaacacagccagcctgagcagctgcgaagggtacatccccatgaagaccaacatcaccgtttacccctgcatcgccatgagcccccgaaacgtgcaagagcctgagtcctccactgccaccccaaaggtgagccccaaagcatcccaggcccaggaaagcaaggaacccagtacaaggagagagatgaaatttgaggatccttggcttaaacgagaagaagaggtgaaaagggagaacgcttactccagcgaggaaggggttaagtgtgagccgctcccaagctccctgaagactgaaggtaagtcagagcaggaactggatggcaggcccagctcaggcaacaggctgagcagcagcagctcagaggcagccgcctttcaagggactgataacgttaggagagtcgtggatggctgtgagatggccctgcctggcttggtggcccaaagtcccctccatgtcaaccgaaacctaaagtcaagcagcctcccaagggcatttcagaaagctgacaggcacgaggagctggacagcttctaccattgcctggcagacagcaatggcttcagtgctgcttcgggcatcccatcctcgaagacaaccctagagaggaaagttgcttcacccaagcattgcgtcctggcaaggcccaaagggaccccgcctctgcctcctgtccgcaagtctagcttggaccagaagaacagggccagccctcaacacggtggtggcagcagcaacaccagcagccccctgaaccagccagctaccttcttggcttgcttccctgatgagtccaacggcaagactaaggatgtcagtagcagcagtaagctcttcagcgccaagctggaacagctggccagcagaagcaactctcttggcaggacaacagtcagccactacgaatgcttgtcgttggagagggccgaaagcctgtcgtcggtgagctcccgcatgcatgccggcaaagatagtaccatgccccgcactgggaggagcctgggtcgcagcactggcgcctcaccacccagctgtggcatcactcagtccacaggggcctctcccaaggccagccagtctaagatctctgcagtgagcaagctcctgctggccagtcctaaatcccgcagcagcctgtccacctccaccaccaaaaccctcagcttctccaccaagtccctgccacagtctgtgggccagagctccaacctaccgcccagcgggaaacacatgtcctggtccacccagtcgctcagcaggaaccggggctctgggctggcttccaaactgccgctaagagcggtcaacgggcgcatttcggagctgctccagggcagtgcgggcccgaggagtgcacagctgcgggcagaggcggaagagcgcagtggggctccctcggaggacaagcccgcagccgcccacctgctgccctcgccctacagcaagatcacccctccgaggaagccgcaccgctgcagcagcgggcacggtagtgataacagcagtgtcctgagtggggagctaccacctgccatggggaagactgccctcttctaccacagcggaggcagcagtggctacgagagcatgatgagagacagcgaggccaccggcagtgcatcctcagcccaggactccatgagcgagaacagcagctccgtgggagggagatgcaggagcctcaaaaaccaaaagaaaaggtccaattcaggtgggtacctggcatggcttgggggggacagaggcatcaggcttctggaccctcacctcccctgttctcgaccagccatgggggaggggttggtctagatactagatctggggtcttgtgctcactttcctcagtgtcctgataccagagaccttggctgaggacgtaacccccagagactttctactcgatgccaggagatactcgctgtggaggtgccaggcagaaagctggtccttgcttcctccatttacccttatctctgccttcacgctgccattcaaaggctgagtctcccaacccttctgacctagtagctacagacgcctatatatggagctggtggcctccaagaccctggaaactgccctcagggacatagggcactttgtctcatcgaaagtgggatgggagatagcctttctccattcctaccccaaacacattggtgacagttatagacacacctgcagtgggtcctgcagtgcctctccccaagtgttaggcaatatatgccatgcaccatgctgcctacctgtgtgtagggggacttggccatctccagaaatatggggtcagaaggtacatatgcccaacacctcatgcctgagctactaatatatcccttggaatttggggtaggcatgtgatagtaagttatgttgggcaaaaagaagaccaaggtcagagagggtggcccggataccatggagcaggcgaatttaaaagacagagagaagaaagtgggtagagacagaggcatgggtactaagaataatatagatgccatgagaattttatctgaaatgtcatttttcattagatactaaagaaagggtccctataagttctttagtgcaagaacttttgattttttttcttaataaaatcaaatcaattgccctgtgtacacttctgcactcctttgagtgagggcagcagaacagaatgccctgctggcctggccttgcctggatatctaccatcttccatacacagccaggctctgcaattgagagctctgaatcctttaccctgcatgtcaatgccatcagcctagtcaggatcaagagatggggtgacatgcagaaacgggtccctctcccccagcagctgctacaggaaccatccttgggcctttacaacctgccgtggggttgcttttgcctgtttcctgccagatgtgacacacacacacacacacacacacacatggagctctgcaatggaccagcccacataagggctgagagcaatgtccatcataaaccatttgtcttccttggatcaaagaattcaatctccggggactacctaagcttgtggtttcccatccccatctgccgtgatataagaggtccatccatctgtgcggtgctctgcagatcacagcacaaggcttcagcgaggacactccattccgggcaagctcagggactgttgtggctactgccacactggcatctgcacttcctagctgtgcatttctaatctgtcttatttcatccctgtcttggaacaggcttttcagaagacacacacctcctgccccagcccctagaaggaggtaaaagtgacaagctgctgagtgtgtcagggcaggcactgtgacctatcccccaggccaggggccctgaaatgtactgatgttagttactgaaaataactaaataccttatgtataccagccttcatggaaaataactgtgctggccttcctagtacttgattgacaggcattgtcattactgtctactccgtgttggtcttcaaagcccggagaacagtatagcatttgcttcaaggctcgctcacgctttcctggtggagcgagcttctgttttctaatttaatgtgtcgctacccagctactttattcttccaccgtcttcaactttctagtcaaggctccttaatgtgtcggtttggagtgaagcagggaagccacggaatggatggggagagagaacaacagtgtggagaatgacagacagctcggagagaggtagcaggctccacacatgtccttgctcagggctgactccagtcataactgctgccctctgagggactcctcttagaaggctattgaaggaaaatggtgtgtcataaaaatgccagggaaggtgctggagacgggatttaatatggagtgtcccgagcatcagacctctgtgcgcagccaccgcagccaccatagaccgagggctctgtgatagataccgcagggaagacttgctcatttcaggttaggtgaccttgtctgccttatttatgattattattaagagaaatgctggccgtcagacgtgatcaacataaatcacaaacaacttctttaaaagaagccataaggcttcctcaaaggaatttcctacctagccggccagtcctcagtcacaggagacgtctgggatttagaactgcagggtaggcagttatgtttcatctgtgattgttttgcgtttggagaattgtaatgatttagttgctttctgactgaaaaagaattataattgtgtcactgggaaatagccatgagctctcagattctgtgtgatgcatatgtaacagcagagatgatcacacatctggatgtcgccaccatacaagccactgcctatagctccacgttgttgaatgagcctgggcttactgcatgctatagtggaaagattaagcttggggtcatgagctatttgactttaattagcctttctgagcctcaattttcttatgtatgggagtttgatagataatggccagggtccttctgctgggcacattattattatgaaaccaaaagtaatcgtatgacatcctttccatagggaaaccccgtgtgaatgaactttattgtaggttgttgtattagtcaattttttattactataaaaggatgcctgagatgatcaacttagaaaggagtaaggtgctaggtggtggtggcacaggtctttaaccccagcactggggaggcagaggcaggtggagcactgagttcaagcttagcctggtctatagagctagtttcaggacagccagggctacacggagaaaccctgtctcaaaaaaacaaacaaggaggaggaagaggaggaggaggaggaggaggagatggaggaagcagaagcaggagaaggagagggagaaggaagaagaaaggctttagctcctgggctcagtcatggccagttgaccttgttgctttggggccagtagtgaggcagcacacccagcaaggcatgcgtagtagagcaatgatgattgggagtggaaagagggaataaagctagattctcatagttccattcaaagtcatgggcccagtgacccagacctcccactatgtcccaccacccaaaggttccaccacttcccaccagtgtcactctgcagaccacacctttaaaacattgataaaacacccataatcaaaactgcagcaagtgttggccattgatcaggcatccccatacttatggtaggaggggcagcatcacagagtttaagacaaccatgagaagtgtgaaatgtccagagagaggacaatgaacagagacatactgccatgtggctgagcccataatgcagccagcagaaggatgcttttgccataggcaaagtcctgcaaatcaaggcaactgcagaaggctgttggggaaaggcctggtcctgaaggatgctgctgctcatacgggctttggaggctgagaaaataaatcatgggagcccaggtttggagcagcaagagcatggcctatcttgggtttattcaaagtagggttcattcatattggggttcattcagagggaatgttcaaggagcacagtgagagcatagaaaatgtaaagccgggtgatgttatcccttgagcatgtgggaaatgtaacaagaacacacagatgcattctatataccgagagcacatgatatagcggagtcagcaatggagtcattacagactctcaagaggaacttctgtgagtagattttcattgattctctacagttcctagccagccctctgtggtaggcagcacaaaactgtgcagcctagagctctgagttagagtgatgataacctggctgggtggggagtagtgtctgcccagccagtaggcatctaagttgctaagagaatataaatcatcactgcaccaaccaagcccccatgtttaaccctgccacatccctctgaagtcctttttatctcactatctgatcccttgcattgtactgtgggttacccttgcaccttcttgcccttgcttgccgtctctttgtttgatggggaagtctgagaattgacagggaccttgctctgaaggtagttcattcccattgcagggggtttggctagctgctaccagcatctgggaaacttgggctagagggagaggctgcctgaagagaagccacgttggttataagctacactcatgccagggccagcctagccatagatttctgcaatacctgcttggtatctagtactgataaggtacagagtgccactaggtatcactgattgattctttgattggtaattggtggctggcagtatagcctgaaaatgtgtctcctgtttcttatcgagagctttagcatattttgtcctattggtgataagtgttttaaatatagttttaagtgtattctagtctgctggtttttggttgtctgttggttggttttgtttttattgtgtaccaaacactatccttccttctcttactgttgaataaacattgacattggataggccagcccaataggctgccattggctgcctgtcgtgaattataccccatttctcagcactatacaggtgtctgtgactaaggaccctcaatgaactggaagtgccccagactggctctgatgatgatctgattctcaggggtgtggcctgattttgttgtaatgagatcaagaatcatagtggctgtttctaggaaacaggggaagggagctggaggttgccagagtgcttctaagagactcaacctagatatagagagaaagggacaaggtgacaggacctggtcacagaagagagagaccgtggtgaatgaacctacccatagaagagaaagaccaggggaaaagcttgaatatatggtcaagagaagacaaaaaagtgactgccctatgacacaggaagctttataaattagatccctagatgtgatagagcagacaatgccagggtcttgcggacagagtgagaatcacagaggatatgaagtggaccaggctgtgtcaggagggaactgggtgagccctagcaaagctctgcctctccatctagagtagtggtcctcaatcttcctaatgctgggactctttaatacaggtcctcatgttgtggtgacctccaaccaaacaatcatttttgttgctatttcataactgtaattttgctagtgttatgaattgtaatataaatgtctgtgttttcaggtggtcttagatgacccctgtgaaaatgtcctttgaccctcagaggggtcccagtccatgggttgagatccactgatctagaggattgaaaagtttggtcagaccattgtaactgactgtatagttgctatcttcagtcatccaggaggccttggctcaggccagcctacttggtgagttccaagccagtgagagatcccatctcaaaaaacacagggtgggtgatacctgaagagtaacatctgaggttgacttcaggcctccttgtgcatgcacaaacatgtacacaaacacatacatgtgtacccccccacacacacacacacacaagcatgcttacatacacatatatgcaaacataccaaagaaaataagtataagagataaatttcttaaaccaatcctggcccactcatgacacaaacttaggtgaacaattatcaacccaagtgtttttacataccagatgtctacatgttgaccatgtgccagctgatgaaggggcagcttgcagtggggcactgcaagacttctacttagcttggattttctacttcctgtggctttctgttgctgacattaccctagatctcaccagcagcctagaaggaagacatcagggaaaaaattgagttcagcaaaagttgaaaatactacttctgaggtggtgatggtgaaccaagaagaaaatcccagaaatcttatgtgtgtggaccagctcagatgccaggcccaagtttctctcacagcagcatggcgcagcaagggcttgcttctgctgcccttgtgagtaatggaaggcatgctctctgcctctgaaatgtcctgaagccactaatgctctaggtgcaggattcacagggtgttttgtgagttaaatgatggaggtttcagctgctgagattgggctcatttgttacacagcagtaggtaatgaatacagaatacatcgtcccactcggttctgcctctgttcttctgcaaacagactcgtcttgacattgcccaagtctgtcttgagggcacctagctctgcccagacaccgagaaacaccctcacccacacattctactacttcctctttaaagggggtattttctgccttgtctcaacaagtgaggagaaggcttcactttctctatgatccgaccatgcaaattatcatttaaatttgaaatgtcccccccactagcttgtgcatttaaagacttggttcctaactgctaacaatgtcttgggagaatgtttaggagtaagtggatggctgggcgtggcctgatttctactagagcaccctctgcttcttcatcatgagatgaatcagctgccttacatcctgccaccatagacgaaagccaggccaccactgtgcctctccatcatgatggagactctactatataccctggaacagaagccaaagcgaattcctccttcttaagttacttccatcaaggaaaaaataatgaatgcaacagttttatcaaaacctggatcaaatggagagggatgacttaggggtacctaccacctgcaagaagcgctgacttaggtcctcttggacactctgcttcactccaccctggaccagtcagagttgtgcctcctgcctttctggtgttgtttcagggctcccagttcacagaggctggagctgagacacagagtaatagaacagcttgccgggagtcagctggcttgggcaggctttaaaaaacaacagcccattatctgatttgttcccatataaaggtgttagatagaccctaagagacagcatttgctttgcccctggggttgatgttccttggtctcatagatcactgcctgcactttattgaagggtgtgtgtgtgtgtgtgtgtgtgtgtgtgtgtgtgtgtgtttgtgtagctaggaggggagaatagaaaagattcctcattgacagcataacgtaagtaagtgcatgtgtgcatgatcacacaaggtaagaataagggctgtgcaaaaaaaaatccttaatatgcagagggtattttgtagaaagtgatcactggagagggaagtgatagggtcacgtccacagggacggagagtggtgaggaagcagccctgtaccctggccttctgtgtccatgttgaagaattctggctccttgtctctgaggccaaagactgtgatttatattttccttctcagtccttggctctctctgcattgcagacaagatggtttcttgggctgcagagatggctcagcagttcaaagcatgcattgatcttgtagaggacctgggttcagttccatgtcttagctgttacaaacagtgttctaataaacatggacacaagtgtctatgtcatagtatatttcactccctgcggatacttatctagaagtggaatggttagatcatgtagtagatctacttgtatcttttttagactgttcttcactgttcttcacaatgcctatatcaatctaccttcctgtaaacaataggccagggtccctactaatttacatcctcaccacaagttttttttctagttaacaatctaataattttaactaataaaatttaaatctcttatgattcttagtatgcatgtggacatgtgtgtatgcatgtatgtgtcacagtttgtggtgttaggttcccagcttgcacagacagcacctgtgccctctgagctgtctcacgcccaccctctgggcctcactatgactagggcaaagtagcacaccgtgtaattctggtatgactttctctgctggctgatgaagctaagcatgtgccctctatttgttggccatttagagtgtgtacattgcccagtgacctaactttctgcccctaggaacaaccttctagaaatggttctgtcaacccctaaaagtcaacaagccagcaaccaattcatgattatttatacatggccttcagcaaatacttaagatctaaaccattacaacaccattggggaaatcatttgttatctggcattccttaaccttaaaacatagaaaaaaagccatacatatatatgcatatatgtgtttgtgtgtgtgtatatatgtgtgtgtgtgtgttttctggtttttcttaaccttaaaacataaaaaatacatatatgtatatatgtgtatatatgtatgtatatgtatatatacatatgtgtgtatatatgtatatatgtatgtacatatatttgtatatatacacatatgaatatgtgtatatgtttatatgtatatatgtgctttatatgtttatatttgtatttatatgtacatatatatgtacacatacatatatacatgcacacatacatatacacacatacatacatacatacatacatatgtgaaataaggaatactgggactagagaggtagcatatttagtcaagtgcttgccacataaatataaggacatgagttcaatccctagaacatgcattaagggaaagaaagaagaaagaaagaaagaaagaaagaaagaaagaaagaaagaaagaaagaaagaaagaaagaaagagagggagagagagagagaaaggaaggaagaagggagggggatagagggagggagaaagtaagaaaaggttgggtgcttgtgatctcagtgctggggtgcaggggcttgttggctggctaaccccatctattcagaaagctccatgccaatgagagagcctgtctccaaaaccaaggtgcatgatgtctgaagaatgacctctggccaccagatacctgtccacgtgtacatgagcaccaaacagacacacacacacacacacacacacacacacacacacacacacacaggaagaaaataccaagacctcagaaaaactgcctgccatctttgtacctgtctagtctcattcagggattaaatgagatgcttggcttacatcaggcaggattatgcttttctatacagaaaatctccatcaatgatagcagagcactctactgctgtgtgtgagcccagaggttccacacctaaacacacacacacacacacacacacacacacacacacacacacacacaggagaatggcagtggtcagctgcggcttgccgcttttccctcagtgtagaaggcttcttgaacagtttgcaaccttcattgtttacagtggtcttccaggtatagtaccaaatactaggaccttgttcccctagcaaggacacctctaatttcattggaatagccagcctctccgggttgtgccaacccgactcatgccctttcctgcacactctttactagggatgcttggagggtggtggctgtaaaggtcaagtaaggcttttgctcatcttctctagatgaatcaaatggtgggttaagatgacaaaggaatggtgggaaactggagggtctcatacacggcgcaaaggctgatgggggatgctgtccatcataacagcagctaacaagggatgttcattatgaccctatgctagtcctcacattcaagttcgccagcatcacctggggcttctctttgtattaggttcccagagacggaggctcattccagcactgtctctcgataccccctcacctgtgaggaaaactgccagcagcacaggggtccgctgggtggacggccccttgaggagcacccagaggagccttggggaaccattcgaaattaaagtctatgagattgatgacgtggagcgcctgcagcgacgtcgaggagctacaagcaaggtgaggccacttcctcctcaagggtcatagatcccccaggttccgccctaaggatagaacttccagagggccttcacaggtttctgggatggccagtggatggcgggcggcagggctctggtcccagccacagactttggtagatcctgtgtgttcatttcctggaacaccttaaaagctagtgagcctgagttctgagggacttttctggctccttgttctgaggttccacacatgagtgcagactgatattttggggagccatggttcttctagattagtacagcctacagtagtctccctggagttgggcgtcttgtctgttgaggtcatcaggatcctatcatgcctctggaaacctgggctcctgtcacccgcccctcccacagtccttctctctggaggtggctgcagggatgagtcagagtggaaggccctctgcttttcttctctctactgcccacctcttcctctgtgaacaggaggtcatgtgcttcaatgccaagctgaaaatcctagaacatcggcagcagagaatcgctgaagtccgagccaagtacgagtggctgatgaaggagctagaagcgaccaagcagtacctgatgctggaccccaacaagtggcttcgtgaatgtaagacccattggcacatgcccatctttgctatcacagtggtctccagtaacacaatctaggagcctaacccaggatgacagccacagagactgcttgcatccgaggcatggggctggtgggatagagatgtcctaaagagtagcaatccttctatctatcaggccagggcaacagagggctagtaagaattcctgtataagatactttcacttgagggtcttagttgagagcacctgaaagcaaaacgtattatcttccctacacctggcagaagattctaagccatagactcatgaggtttatctagcctaaaatggaccaggactatagctctcttcatagactaatatgtgccacccacaaactgttcctggtgaccctgaaaatccaatgaccagctcttgggttaattccattaagccaagagcccaggtgatagtaaccaccaggtaactatttgtaatggtgctgttctttttgagagatagatttgattgtccctaatttatttgttaccagctattccatttacttcaaaataaggcttaactttgctccggctattaacactgatatgggaccaatcctggaaggctttgtctgtctgtaggtaaaatacaacagcagctttacaaaggctctctccacaactttcctgcccagctcttccctccaacctcctcttgttaacaccttctcctgcgagtcacaccctcctggtgctccctgctggtgaggaatctcacagatggagcctagaggcttggatgtgtgttccaaagagctgggtttagaacagactggaaacgatgatacaggtgaagaaaggctcctgactagcttaccaagagtaataaacccaccttcacagcgtctctttcttggaagctgagaaaatagagagccctactatttggggctgcatctatgtccctgctcaaggtcccacagacatgatttcaatactggcttttgctacgtgctggctgtgtaactttgggtaaggtgttttctgactttgggtcttggtttccttgctataaaagagaagagtggtcatgcccatcccatagggtggttctaggctgcagcaaatgtttatgctgcatggtccagaggaggagtttggcatcttggaatatatgcagttatcccagagttcagtcaactagatagtctggcagcagctacttcttcagtgcctgtttgcatggtacaaggttagttccttggttagagatttgagcagagatacaaactcccccaccaacaggattttcatctcaagtagaatgagaccaacatgggaatgaggatgagcccaaatctgactgacacctaagccgcccaatgcctcttctctgctctctcctttgtctttcatggacacctgggtccatcctggccccttaggtggcaccctcattttcgccatccttgtatttttcaaaagcagcttatgcccaagacaggcttgaaaatgaccatcattttccaaactaaatttcttcccccccaaccctgggatgcgaatgagcttacacacccgtgcacatgtgcctcagatgcttggagtgtgcaattgctctcttcctgccttggtacatgtcaagggttggtagtatttctttttttgatgctgagacaaaaaacagaaggtcacatgaaagggagaaatacagatatttttaaaaagataaatttaaactaggaatcagaagaaaaaaaatcaaggagactgagtgctaactctcaagacggatgggtagtggacaatgctacaacaatgcgatgggctgagctccatctccagttctagcttcccctccttttgcctctctacagaggagcctgtgagggtgtctggtgtgcttgggatagggtgaggctctggtttcaatttactgagctgagatgtagagggaccctgggtctgtctctagccacagtgcttattagcaatataaccttgagcgaggactacatgcatagctgcccctgttaaaagaactctactccatgacagaccctcgtgtttctgtatcgggtgtggttttgcacatctgtcacatttatgttatgttcttcttgttggtgactcaagatggataggagaagaaggggaagggacccctccacttcctcctcttgtgttgctgttaaggaagcgatgcaggctgaggtagttttgcccggctgggaatttaatgtgaggtccctgctaagctacccacccccatcaactactgtccattccctgctgctctccccattcagaccttttataacacccctcaaaatgagatcaggctctgccaagccattatgggggcaaaggaactccagatccctgcccctcaggaaaggaacgcacaaggacttttgttgctataggcctgcacccgatgcaagacacaatggccatatgactcgatttgtgttttgagcctaaaggttgtcttaattgttagtacatgttttttaaacatcatatgtacacacacacacacacacacacacacacacacacacagtgaccagtgaggtgagcctggtgaagctgggtcaggtcatggttttgctgagcacctcagctctcaggcagaggagacaggaagactgggaggttaaggctcacttcaggtgtattgagagttagaggccagcttgtgttacacaaggcaagatcaagacccccagcctgaggggtagcaacacatcacacagggatgggaaacaggaacctcctttttctaggagggtggggtatgcatgtcactcatcactcctgaaagggactcttgctgccttagcatcccaagagtttcttgcctcaaagatccgtgttggaggcagcgagggtaggcatcggaagttctagaccacctccctgttccttagaattgtctctgaatgttaagaagctagaaaccagaatgggtgtcacttcctctggctgagggccaggcaggaggggatgcttatgtggcacaactcagttgcccttagcccagaggaggtgggggaggcagaccttcttacagttagctctcccatctctaagagctcctttctctttcagttgacttggagcaggtcctgcagctggattccctggagtacctggaggcactggagggtgtgacagagcgcttggagagccgcgtcaacttctgcaaggcccatctcatgatgatcacctgctttgacatcacctccaggcgccgataaggactgatgggctctgagccatcaggccctctctcccccaggacttcagcaggacaccgccctcccaagccctctgtgctggcaacacccaagacaacaggatgaggatgaaggttggtagcaagtctggagtgagcgtggagcgaaaggcgatgtttcctttgtttgccataggaaagaaaggtacagacaccaacatgtggaaggaggaaatgatgggaagccccgtgggactgagaaagcactttgaggaaccttgaagaactctgtacataggaccgctagcaaagagactcttaccttgcggctgtgggaaaggggagggtgacatgggattaccatggagaacgaaacaccaacaagatgacccagaatgatggattaagtgccttgcaaatctttatgattatccaaacattgtgtccgtactttcttgtgtccagatggtgctagtcaagaagaaatcaacaaaacagaaaactcaacccagtttttgaaatgtattgacggcttgttttctcttggtatttttctcttgtttctgatttgctgtttgtttctaagaagttgtgtttgtagtgatgtctcctaatcggtattgcagctgaataaatgttaactgtctttcatggctcttctggtaaggccactcagaccgtggaaaccgcgttggcatgagccggtgtgtttcccagggaggtttggaaggacaggtgatgggagagactatcttccaaagcggcaggtcagctggcagacccagggttgggcatggaataggtacacatgagctttagtgacaaggagagatgtctttaaggggaagagagatgtgagcccctgtccctgtttgtttcatgggcttgtggctctcaacacaagctcatgttcctttctagcccaaagactggctggaaagcttgggcaaccgcagccgagtcccatttctttgtttactgtggcatcactgatgcaaagtggggctgtctacatttcgactctctgggctcacacgggcttggggttgcatcgttttctgccatccagtgtcctgtccagtagcaagaggccaactctcccctgtcctaaagcctccatggcttgtccctgccaccttagtatcctaagaaagagagagaaaccccatccctaaattccagaccccacatacatagggcagagtggagatctagatcttgcccccccccccaaaaacctgaggactttattctcaaattatcctcctcctttcagggctattggaccatgttagggagataggactgaagcatggaatggtcaggcattgtctacaggcctctggaacaactgagcattgcaggagggccaagaattctctctcccagagcctctgcagcctgcctgtgcaaacacaagctcaggggtttggaaagaggactctgaatcctcaacctttgtgtggcacatctgggccagccccactaaccaactccttgaccccagatgctctctaaagagaaagaactctgtgtttctggaccagcccttttgctggacgcctgcatcccagcacagcacgatgcatggccagcagaactcatcacacaggagtcatgtgagtgctgtggcacctgatccttgatacagagcagggcacagatgaggccatcggcttgactgttttagaagtcagccttgtagaccaaaagctagccccatgggtcactcagtcctgctttgcacattcctaagagttgactcttctgcaaaagggtcccaaggtgctgattgaatggcctgagctctggaatggcccctttccccttctgtgtatcttgtagctttaacaagtgtgtctcctagagaagcagagccttctcagatcttctccagctcctcccagtgccattcggcaggagtcctgggctcagggcccacctcagcctcataacacatgtgtgcatggacctgcttaacagcaatgttcttggaagcttctacacccataggggtgccaatactttgaacatctgttttgattgctggtttgaaatatacttctgttttgtttcttatgaagggccttgatttgggaagttttgctcaaaagcaaattcatttgattagtaatccatgagcttggctttggtccctgctgccttttcccttagccgtgaggtcatcaggccccagtgaatactttaacgggccaccaacaaagcccagtgcctttgctggagtgagactgggctgacatctgtagaaagcagactcttagtcagcaggttctcctgggagagcagccctcggttgcctcccactcggatttgcttgcataccttccaagcatctttatgcttcagctaggccatattaccagggttacttgaccaggcgaggttagcttcccagggggtcacatccacatgacagggcatcccactggactccaccggtggtgcagggagatgtttgtgtgaaataatgcacatctcttgtccattctaatatcctgcccccccccacacacaagtaagctgtaagcatcttattctaccacatagctctatcttagctgataagccttggagaactccggcatcccatgatgcaactgttccctgccctatctctgagatgcctatgggagtacaactctctaggtgccaagacgtagtcctggtgtctgatgatggtgccagtgtgaggtggctccgggtttggcttgaggaacacgcaaacaaataccaaggggcaaagggaccgccaaagaactcacttataattcattatccatccgtagatggccccaaagtgtttccttgaaattaatatttaggttcctatgccttacttgaattctgtccttccccccataactgcagctgttgatagattttacaatcctaataaatctgtatagaagacacacaatccagatattttcattataagccacatgcctaggttgggcagatctagggctatgctaacttattctccggctataagaccccttgatacttgctgtctctcctggccacctgattctggtccatggccactgcctgctccaccatcttcttcctctccccatctctgtccagatcttcaactctctcttgagcctccatccccatcttccccttccactgcccaatcacaggctctagccttttattgaccagttaaactggggagacagttcgcatggcatcagttgagtttgtgatggtctgggcaaccacttctgtaggaatcagtgttagcattaggattcaaaccacatcatctagccctgcttcaaagaatctagtgtgaggcagaagcattttcagcccaagtaaaactaaaatctgaaacaggggcatcattctcccaggaggaaacccttagttcacctcacctgggccaggggataggtgcggttgctctgagggagctggggtttgctttcagtacccacctaagagctgaatcttttgagctgaatcttttatcttatctctgaacccttctggaaacctccggacgctgtctctaactttcatctcagcagaggtgaaacccagaccactctcttgtggtttcaccttcagttgctgttcccaacatggggaacataagatacagtttcagagatggaccctctgatggcatagcaatgactcaagtaatgacccccaagcaagaaaatggctcctgagctagagactagtgtaaggaacatcacacagctccaggaaatggggcaaagggtgggcagcaggaatgttcatccagtgggaaccaggtcccatttgccacaaatcagcttaaagatggaggtctaacatccaggaaggagctccaatgctctgtagggaagtgctcccaagggacctaacactcaggttgtgcttgctgcagggagttccatccaaactttgagcaagaaaagcatctgccctgtgggcatggatcccacatccttgaggaacagccaccttctctggtcttcggagtctcgtgctcttcgttcatgaggatccattcatatgccttcttcacagctctgtatttcaatcccgctgtctgcccttgactttccggtaaagaaggtgaggttggcaggagcccacaatttgctcagtgcaaacatggcctttgccgatctgtagctgagcccgaagtgaatgttttttgggtttccttattccaccaagaattgtagtctgtaaaagaaattactaaaaatgagttccttccaaaatcgaaaacagatttcctgaatgttgttctttccttgggacatatgcaaaaacatttcctcccttttagggtagtttatctttaaaaccaaagccagggcccattagaaacatgttgaaaatcctgtgttctatgagttgatgctgactaagccatccactgtcatcgtccttcctgccttcctgccactgcctagatttggccctgatttccacattgaaaggggtgtgcttagtgctaacacatgtgtggctctgggagaggccgacacagcccgctgctcttctctgagccaagttaaacagctgagggcaagtttcacagacatgattggttaatggttctaatttttttttcaagtgatagaaacacagcattcttgtacagtatatagattaccactctcctggacaacatcagtaacctctttacaacattacgaagccatttgtaaaaacacataaattgtattgtttagccatcttcctgatgtgtcagaatatatttctaagtgacaaactctgaattatttccataagaataaaagcaggattataaccaaggaaactatcttaaatccaatgtatcctctcaaaaataaggggggaggggtggtgaaaacatctaagagttaatttatccattcctaaacaaacacattctactttggggtggccctttgcaaaacctgaggtgatgtcacaatgttggacatagtgtgacactgtgggaggggcgaagctgaatattctccacacacaacaattactggtgtcatgtgaaagtgagcactccaatccctgggttttatgtccacttagaatgaccttgcccaaaggagtctcctgcatccattccccacaccgccagcctcctacactgccaggcttgacttaaggagacattattgatttgtaacctcagaatgctgtcctgtaacaccgcttatgttcctagatctatttctgcactgtggtcaggaacgccctccacacgtcctgagttgaagtgtgtgtgcttgctcggtctgtgttttgtcttttttcttctgtttttcttactccagcgatgtctattagcagagacatgggccagggaagggtgatggatacagccaggggtgggatatcagcctcaaagtgcagagctttgctctgaatctcagcaggcagccaaagggactgagacaaagctcttcctttcaagttggcatggcaatcaacttggaaatcaggttccccgggcctttgccttcctaacaaaggatccagcctcctccaactgggtctccactcagcccctgtagaaaagtgctgacagtattaagttctactcttccctaagaccccaggaggtcctcaccgtgcatagatgtgccatctgttcttgagaaaccaaagcactttagtgagtcttacaacccataatacttacagtatttgccctctgaaaggtggaaggggcttgggctaggtctcatttgagaggcaactagagctaggaggaaaagcctggagctagacagcagggagctaagccacatctgcaccaccacaagctatgaacctcgggtaggttgctgaattttgctgccccccccccctagacagttgtggggaggtcctaacagctaccctcctgggatggcagaaaaggaagggaataatataactggtgggacacgctttgaagaaatcagaagctctctccagaggggagggaggatcatgtatagatgaagaagttgacatccgtactcactgcctggccaggttcacagtctcacagcagaactgggacatgagccccgccacctggagtgtccctgatagagcacctttcacccagagtgtgtacatgaacacaggctgcttctctgtgccagtgtgtgcacatatgtgggtgtgtctgtatggggggtgtgtgcagcacagatgaacgtaggacagaaactccgagtcctaattcctttctaacagtcgacctgtctgtggcctgggacacacaaccaactcttctggacctcagattttctaagtcataaaacaaggacattgtggcatgggatctttgtggttcttccaactttggtgacgagagcccctaacgggtgatgtatgtatgtatatatcgatatgcttatctgtagaaacgggcccattgggaaattggagacgaggcctgcccgagtgcattgacttgtaacagaatcggcaacttcacaagtccgtaagccttcattttaaaagtcgatgggatggtgtcatttactgtcattgtttcaaattcactgttgaactgggtagaggattggtgctgttttaaaaactaagttcttagctcacaagtgtttgctgttacttttcaaaacacgagtcatttgttcaaaagtcaaacttttaactctgccttgggcaggtccccaacagcctgttttgcaggctgggttttgtgtatgggcttttacataactatataaaagttagctgttggcttgatcatggtaaatatgaacagattgcctggagaacagtccagaaaagaattgaattctatagttctcatcaactggtgacatgaaaccattaagctgtgtgcaattccctggtgtgaagatattgttcactggctacagtctctgactttgtggcatatgaggtataaaatgttgtaaaaaaaaaaaatctggtgtttaaaagaatcaaagtatggtggcattaaatgttcacttttatccta

SEQ ID NO: 5 - DNA, 20 bp, synthetic construct
  source 1..20: mol_type = other DNA
cgtgttcttcacactgcaca

SEQ ID NO: 6 - DNA, 20 bp, synthetic construct
  source 1..20: mol_type = other DNA
gacatcgcctaccagctcat

SEQ ID NO: 7 - DNA, 20 bp, synthetic construct
  source 1..20: mol_type = other DNA
acagtagatggacctcggga

SEQ ID NO: 8 - DNA, 20 bp, synthetic construct
  source 1..20: mol_type = other DNA
gtagtgaagagacccaggcg

SEQ ID NO: 9 - DNA, 20 bp, synthetic construct
  source 1..20: mol_type = other DNA
aacctgcagagcatggactc

SEQ ID NO: 10 - DNA, 20 bp, synthetic construct
  source 1..20: mol_type = other DNA
ccttgcccgacttgaaggta

SEQ ID NO: 11 - DNA, 20 bp, synthetic construct
  source 1..20: mol_type = other DNA
ctgacggcaacttcaactgg

SEQ ID NO: 12 - DNA, 20 bp, synthetic construct
  source 1..20: mol_type = other DNA
gggaggattgtggccttctt

SEQ ID NO: 13 - DNA, 20 bp, synthetic construct
  source 1..20: mol_type = other DNA
ctttggctacgagctgagca

SEQ ID NO: 14 - DNA, 20 bp, synthetic construct
  source 1..20: mol_type = other DNA
tgatgcgctgacggatgatt

SEQ ID NO: 15 - DNA, 20 bp, synthetic construct
  source 1..20: mol_type = other DNA
cgagcccgatctgaagaagg

SEQ ID NO: 16 - DNA, 20 bp, synthetic construct
  source 1..20: mol_type = other DNA
cccagaggtgacaaaggaga

SEQ ID NO: 17 - DNA, 20 bp, synthetic construct
  source 1..20: mol_type = other DNA
ggcactagtcaaccctttgg

SEQ ID NO: 18 - DNA, 19 bp, synthetic construct
  source 1..19: mol_type = other DNA
ctgcactgccaagactgag

SEQ ID NO: 19 - DNA, 20 bp, synthetic construct
  source 1..20: mol_type = other DNA
ctcaactcggtggccattca

SEQ ID NO: 20 - DNA, 20 bp, synthetic construct
  source 1..20: mol_type = other DNA
ccacctctgacttctgcctc

SEQ ID NO: 21 - DNA, 20 bp, synthetic construct
  source 1..20: mol_type = other DNA
gtccaagcaggagggcaata

SEQ ID NO: 22 - DNA, 20 bp, synthetic construct
  source 1..20: mol_type = other DNA
ctgactgacccttcgctctc

SEQ ID NO: 23 - DNA, 20 bp, synthetic construct
  source 1..20: mol_type = other DNA
gaccgacgattccatgtcca

SEQ ID NO: 24 - DNA, 21 bp, synthetic construct
  source 1..21: mol_type = other DNA
aggtcggtgtgaacggatttg

SEQ ID NO: 25 - DNA, 20 bp, synthetic construct
  source 1..20: mol_type = other DNA
tttcacacagctgccgagat

SEQ ID NO: 26 - DNA, 20 bp, synthetic construct
  source 1..20: mol_type = other DNA
cctggctttctcgtcactct

SEQ ID NO: 27 - DNA, 20 bp, synthetic construct
  source 1..20: mol_type = other DNA
ggatgaggaatgcgccctaa

SEQ ID NO: 28 - DNA, 20 bp, synthetic construct
  source 1..20: mol_type = other DNA
tcagccaactcgtcacagtc

SEQ ID NO: 29 - DNA, 20 bp, synthetic construct
  source 1..20: mol_type = other DNA
atactggtgaggttcacgcc

SEQ ID NO: 30 - DNA, 20 bp, synthetic construct
  source 1..20: mol_type = other DNA
tcctgttccttctgggccat

SEQ ID NO: 31 - DNA, 20 bp, synthetic construct
  source 1..20: mol_type = other DNA
gtccaatgtccagcccatga

SEQ ID NO: 32 - DNA, 20 bp, synthetic construct
  source 1..20: mol_type = other DNA
atccacagggcgatgttgtc

SEQ ID NO: 33 - DNA, 20 bp, synthetic construct
  source 1..20: mol_type = other DNA
tctgtcatgttgcctgcact

SEQ ID NO: 34 - DNA, 20 bp, synthetic construct
  source 1..20: mol_type = other DNA
attggccttcacactgcgat

SEQ ID NO: 35 - DNA, 20 bp, synthetic construct
  source 1..20: mol_type = other DNA
ccagtcgtagcctttgagca

SEQ ID NO: 36 - DNA, 20 bp, synthetic construct
  source 1..20: mol_type = other DNA
caccttggtctccagaagga

SEQ ID NO: 37 - DNA, 20 bp, synthetic construct
  source 1..20: mol_type = other DNA
ctgaaccctggtaaccctga

SEQ ID NO: 38 - DNA, 20 bp, synthetic construct
  source 1..20: mol_type = other DNA
tggtcttgccattcctggac

SEQ ID NO: 39 - DNA, 20 bp, synthetic construct
  source 1..20: mol_type = other DNA
ggtctctgtcatcagctggg

SEQ ID NO: 40 - DNA, 20 bp, synthetic construct
  source 1..20: mol_type = other DNA
gaactgcctggggtctgaaa

SEQ ID NO: 41 - DNA, 20 bp, synthetic construct
  source 1..20: mol_type = other DNA
ttaagctcacactgctcccg

SEQ ID NO: 42 - DNA, 20 bp, synthetic construct
  source 1..20: mol_type = other DNA
ggtcaatcctgcctccttcc

SEQ ID NO: 43 - DNA, 20 bp, synthetic construct
  source 1..20: mol_type = other DNA
attggccttcacactgcgat

SEQ ID NO: 44 - DNA, 23 bp, synthetic construct
  source 1..23: mol_type = other DNA
tgtagaccatgtagttgaggtca

What is claimed is:

1. A method of treating or preventing pathologic calcification or bone formation in a subject comprising administering a therapeutically effective amount of a synthetic nucleic acid against KIF26B.

2. The method of claim 1, wherein the synthetic nucleic acid comprises:
SEQ ID NO: 1 or a sequence at least about 80% identical to SEQ ID NO: 1;
SEQ ID NO: 2 or a sequence at least about 80% identical to SEQ ID NO: 2; or
any variant thereof having KIF26B inhibiting activity.

3. The method of claim 1, wherein the synthetic nucleic acid is a small hairpin RNA (shRNA).

4. The method of claim 1, wherein the therapeutically effective amount of the synthetic nucleic acid reduces KIF26B mRNA or protein expression.

5. The method of claim 1, wherein the subject has or is suspected of having intra-articular ectopic calcification.

6. The method of claim 5, wherein the intra-articular ectopic calcification is injury-induced ectopic calcification or surgery-induced ectopic calcification.

7. The method of claim 1, wherein the subject has or is suspected of having pathologic osteogenesis, heterotopic ossification, pathologic bone formation, osteoarthritis, arthroplasty, or a traumatic injury.

8. The method of claim 1, wherein the therapeutically effective amount of the synthetic nucleic acid:
reduces or prevents osteogenesis;
increases chondrogenesis;
reduces expression of osteogenic marker genes;
increases expression of chondrogenic marker genes; or
reduces expression of Wnt/β-catenin pathway genes.

9. The method of claim 1, wherein the therapeutically effective amount of the synthetic nucleic acid reduces cell proliferation, reduces cell viability, or induces cell apoptosis.

10. The method of claim 9, wherein the cell is a progenitor cell, a stem cell, a cell capable of osteogenic differentiation, or a cell capable of chondrogenic differentiation.

11. The method of claim 1, wherein the therapeutically effective amount of the synthetic nucleic acid reduces or prevents ectopic calcification or formation of calcified nodules.

12. The method of claim 1, wherein the therapeutically effective amount of the synthetic nucleic acid is administered intra-articularly.

13. A method of inhibiting KIF26B expression in a subject in need thereof, the method comprising administrating a therapeutically effective amount of a synthetic nucleic acid against KIF26B.

14. The method of claim 13, wherein the synthetic nucleic acid is a small hairpin RNA (shRNA).

15. The method of claim 13, wherein the synthetic nucleic acid comprises:
SEQ ID NO: 1 or a sequence at least about 80% identical to SEQ ID NO: 1;
SEQ ID NO: 2 or a sequence at least about 80% identical to SEQ ID NO: 2; or
any variant thereof having KIF26B inhibiting activity.

16. The method of claim 13, wherein the subject has or is suspected of having intra-articular ectopic calcification.

17. The method of claim 13, wherein the therapeutically effective amount of the synthetic nucleic acid is administered intra-articularly.

18. A composition comprising a small hairpin RNA (shRNA) against KIF26B, the shRNA comprising:
SEQ ID NO: 1 or a sequence at least about 80% identical to SEQ ID NO: 1;
SEQ ID NO: 2 or a sequence at least about 80% identical to SEQ ID NO: 2; or
any variant thereof having KIF26B inhibiting activity.

19. The composition of claim 18, wherein the shRNA reduces KIF26B mRNA or protein expression.

20. The composition of claim 18, further comprising a lentivirus.
